United States Patent Application Publication US 2005/0181375 A1 - sequence listing, part 5

SEQ ID NO: 4551 - DNA, 2776 bp, Homo Sapiens
aggaggaggaggaagatcaggaggaggaggaagaagaggaaaaaagagaaaaagaagaaatatcacagaaaaaaaaattcttcgttgtctagactgggctttttttcccccctaaaaaatagcatattggagaattgggagaagtctctttggtttggaaaaaaaaaaaaggaatcttcagcctagatcactttcttatccggactgggatattaaatatacgacacatccaggagtttattggagcgcagactgatggcgcaaaggtacgatgagctgccccattacggcgggatggacggagtaggggttcccgcttccatgtacggagaccctcacgcgccgcggccgatccccccggttcaccacctgaaccacgggccgccgctccacgccacacagcactacggcgcgcacgccccgcaccccaatgtcatgccggccagtatgggatccgctgtcaacgacgccttgaagcgggacaaggacgcgatctatgggcacccgttgtttcctctgttagctctggtctttgagaagtgcgagctggcgacctgcactccccgggaacctggagtggctggcggagacgtctgctcctccgactccttcaacgaggacatcgcggtcttcgccaagcaggttcgcgccgaaaagccacttttttcctcaaatccagagctggacaatttgatgatacaagcaatacaagtactaaggtttcatcttttggagttagaaaaggtccacgaactgtgcgataacttctgccaccgatacattagctgtttgaaggggaaaatgcccatcgacctcgtcattgatgaaagagacggcagctccaagtcagatcatgaagaactttcaggctcctccacaaatctcgctgaccataacccttcttcttggcgagaccacgatgatgcaacctcaacccactcagcaggcaccccagggccctccagtgggggccatgcttcccagagcggagacaacagcagtgagcaaggggatggtttagacaacagtgtagcttcacctggtacaggtgacgatgatgatccggataaggacaaaaaacgccagaagaaaagaggcattttccccaaagtagcaacaaatatcatgagagcatggctcttccagcatctcacacatccgtacccttccgaagagcagaagaaacagttagcgcaagacacaggacttacaattctccaagtaaacaactggtttattaatgccagaagaagaatagtacagcccatgattgaccagtcaaatcgagcaggttttcttcttgatccttcagtgagccaaggagcagcatatagtccagagggtcagcccatggggagctttgtgttggatggtcagcaacacatggggatccggcctgcaggtttgcagagcatgccaggggactacgtttctcagggtggtcctatgggaatgagtatggcacagccaagttacactcctccccagatgaccccacaccctactcaattaagacatggacccccaatgcattcatatttgccaagccatccccaccacccagccatgatgatgcacggaggaccccctacccaccctggaatgactatgtcagcacagagccccacaatgttaaattctgtagatcccaatgttggcggacaggttatggacattcatgcccaatagtataagggaactcaagggaaaaggaaacacacgcaaaaactattttaagactttctgaactttgaccagatgttgacacttaatatgaaattccagacagctgtgattattttttacttttgtcatttttcatcaagcaacagaggaccaatgcaacaagaacacaaatgtgaaatcatgggctgactgagacaattctgtccatgtaaagatcctctggaaaaagactccgagagttataactactgtagtataaatataggaactaagttaaacttgtacatttctgttgatcacgccgttatgttgcctcaaatagttttagaagagaaaaaaaaatatatccttgttttccacactatgtgtgttgttcccaaaagaatgactgttttggttcatcagtgaattcaccatccaggagagactgtggtatatattttaaacctgttgggccaatgagaaaagaaccacactggagatcatgatgaacttttggctgaacctcatcactcgaactccagcttcagaatgtgttttcatgcccggcctttgttcctccataaatgtgtcctttagtttcaaacagatctttatagttcgtgcttcataagccaattcttattattatttttgggggactcttcttcaaagagcttgccaatgaagatttaaagacagagcaggagcttcttccaggagttctgagccttggttgtggacaaaacaatcttaagttgggcagctttcctcaacacaaaaaaaagttattaatggtcattgaaccataactaggactttatcagaaactcaaagcttgggggataaaaaggagcaagagaatactgtaacaaacttcgtacagagttcggtctattaattgtttcatgttagatattctatgtgtttacctcaattgaaaaaaaaaagaatgtttttgctagtatcagatctgctgtggaattggtattgtatgtccatgaattcttcttttctcagcacgtgttcctcactagaagaaaatgctgttacctttaagctttgtcaaatttacattaaaatacttgtatgaggactgtgacgttatgtt

SEQ ID NO: 4552 - DNA, 383 bp, Homo Sapiens
  misc_feature (14)..(14): n is a, c, g, or t
  misc_feature (19)..(19): n is a, c, g, or t
  misc_feature (28)..(28): n is a, c, g, or t
  misc_feature (31)..(31): n is a, c, g, or t
  misc_feature (143)..(143): n is a, c, g, or t
  misc_feature (178)..(178): n is a, c, g, or t
  misc_feature (190)..(190): n is a, c, g, or t
  misc_feature (220)..(220): n is a, c, g, or t
  misc_feature (269)..(269): n is a, c, g, or t
  misc_feature (272)..(272): n is a, c, g, or t
  misc_feature (295)..(296): n is a, c, g, or t
  misc_feature (301)..(301): n is a, c, g, or t
  misc_feature (313)..(313): n is a, c, g, or t
  misc_feature (321)..(321): n is a, c, g, or t
  misc_feature (333)..(333): n is a, c, g, or t
  misc_feature (339)..(339): n is a, c, g, or t
  misc_feature (358)..(358): n is a, c, g, or t
ctcgccgttcctgngggtngatgctcgnctntgggttagcagcaccctgagcggagataagagctgcccgccgccgcgtaaccccgaggccgagactcctggcctggcctccttgggcccacgacgcctgccccgcggagacnccaatgggcctgaggtttgtgtgcggggcctcagncgagcgctggcnagctgttcccccatcgtctgcgccctgggnctcggccctccccgtggaaggaccgcgggcttcggggccccacgctggnggngtgactcctgccacacacacagnngtggncgcgggctgagnggcggcanacacgccaattntgctcngggctgcgtgactgagggngaaagatggtgtgaattgggtgggc

SEQ ID NO: 4553 - DNA, 1795 bp, Homo Sapiens
acgcgtccgcccacgcgtccgcccacgcgtccggtcggggccagagcgcaggtgtacctggcggccgtgctggagcacctgaccgccgagatcctggagctggctggcaacccggcccgcgacaagaagacccgcatcatcctgcgccacctgtagctggccattcgcaacggcgaggagcttaacaagctgctgggcgaagtcaccatcgcgcagggcggtgtcctgcccaacattcagggcgtgcttctgccccagaagaccaagagccaccacaaggccaagggtgaaaaccattcactaggagaggagaaacacaatggccaccaagacagagttgagtcccacagcaagggagagcaagaacgcacaagatatgcaagtggatgagacactgatccccaggaaaggtccaagtttatgttctgctcgctatggaatagccctcgtcttacatttctgcaatttcacaacgatagcacaaaatgtcatcatgaacatcaccatggtagccatggtcaacagcacaagccctcaatcccagctcaatgattcctctgaggtgctgcctgttgactcatttggtggcctaagtaaagccccaaagagtcttcctgcaaagtcctcaatacttgggggtcagtttgcaatttgggaaaagtggggccctccacaagaacgaagcagactctgcagcattgctttatcaggaatgttactgggatgctttactgccatcctcataggtggcttcattagtgaaacccttgggtggccctttgtcttctatatctttggaggtgttggctgtgtctgctgccttctctggtttgttgtgatttatgatgaccccttttcctatccatggataagcacctcagaaaaagaatacatcatatcctccttgaaacaacaggtcgggtcttctaagcagcctcttcccatcaaagctatgctcagatctctacccatttggtccatatgtttaggctgtttcagccatcaatggttagttagcacaatggttgtatacataccaacttacatcagctctgtgtaccatgttaacatcagagacaatggacttctatctgcccttccttttattgttgcctgggtcataggcatggtgggaggctatctggcagatttccttctaaccaaaaagtttagactcatcactgtgaggaaaattgccacaattttaggaagtctcccctcttcagcactcattgtgtctctgccttacctcaattccggctatatcacagcaactgccttgctgacgctctcttgcggattaagcacattgtgtcagtcagggatttatatcaatgtcttagatattgctccaaggtattccagttttctcatgggagcatcaagaggattttcgagcatagcacctgtcattgtacccactgtcagcggatttcttcttagtcaggaccctgagtttgggtggaggaatgtcttcttcttgctgtttgccgttaacctgttaggactactcttctacctcatatttggagaagcagatgtccaagaatgggctaaagagagaaaactcactcgtttatgaagttatcccaccttggatggaaaagtcattaggcaccgtattgcataaaatagaaggcttccgtgatgaaaataccagtgaaaagatttttttttcctgtggctcttttcaattatgagatcagttcattattttattcagacttttttttgagagaaatgtaagatgaataaaaattcaaataaaatgataactaagaaaaaaaaaaaaaaa

SEQ ID NO: 4554 - DNA, 566 bp, Homo Sapiens
aggtccggtatgagtgcaaaaacgtacttctatactaaaagcttattacctctttgtgatatattctaaataatgaaaaaaatgcgatggacagttgtgaacctaattctgtgttttgcatattgagttgcagtacctaccccagctaactggcagcagcatccttccagcttaggataataagaagtactactgtgataccaagaaacttaactaccgttttccaaacatttaaaggagctaggagacatgattttaaaaaaggcaatcaatagatgctttgaagaaaataaaacttatacagttgattgaaaacaattacaatgttgaaaacacaccaggagaaaacataagcaagaaactgggaggccaactggcaacatatgaagggaaattccagatccagtcttccatgcttgatgatggtgtccagaaaagaaaaaacctgtttggagttgcacttgtatttcagtttatgtaagtagccgaacttatggacagaatatgaactgtccatacctctgggaaaactagatgatatcaaacagatttatgcttcagttgga

SEQ ID NO: 4555 - DNA, 403 bp, Homo Sapiens
gtggaggacttgtctgactcactctggcccaggcagcagccggagtcggtgtcggagagctcggagtcccgctccttggtgctgtgggggagcacgaggctctggcggaccaggagctggatggtgtcattcaggcggacctcgtagtcgaagagggtatggccgtcctccatctgtttgcccctgtagaacagcctctgcaggcctggctccacgtggaacagctcctggatcttccgcctcagctcctccaccttggtcagcctggacagcgagtccaccgtgtgggtctgcctcccgtccatggtccgaacctggatccacatggtgtcggcgctgaggggagggacagcaaaaacccccatcagttttaccagcacctctgagccatgccatgctctaa

SEQ ID NO: 4556 - DNA, 309 bp, Homo Sapiens
gcggccgctgcactatgcggcctggcagggccggaaggagcccatgaagctggtgctgaaggcgggctcggccgtgaacatcccgtctgatgagggccacatccccctgcacctggcggcccagcatggtcactatgatgtgtctgagatgctgctacagcaccagtctaacccgtgcatggtggacaactcggggaagacgcccctggacctggcctgcgagttcggccgcgttggggtggtccagctgctcctcagcagcaatatgtgtgcggcgctgctggagccccggccgggagacgccaccga

SEQ ID NO: 4557 - DNA, 411 bp, Homo Sapiens
  misc_feature (136)..(136): n is a, c, g, or t
  misc_feature (147)..(147): n is a, c, g, or t
  misc_feature (161)..(161): n is a, c, g, or t
  misc_feature (169)..(169): n is a, c, g, or t
  misc_feature (326)..(326): n is a, c, g, or t
  misc_feature (354)..(354): n is a, c, g, or t
  misc_feature (377)..(377): n is a, c, g, or t
  misc_feature (387)..(387): n is a, c, g, or t
  misc_feature (399)..(399): n is a, c, g, or t
ctcgccctcagaatgcagaggggatgaaacactgaccggacaattcaatctgtatatgggagataaactggaggggaagacgaatggcaggagggtgaagaggaaactgaattactgtgcaaacacccggccactnaaatccgggtngttactgcagagtnaataacgntaggtactatttcgtgtaaggcaaaagtcctttgaaagggctcctagagcgtcaaggcctccacctgatgaatgaatgagtcaggcagggcccaagctccacttcacggatgggaaaactgaggtacgaggcctcgctgaaaagatgcgaagcagancggagaaaccagaagcaccacttctctnaggctgatgctctaatctcgggntccccccggncctacaatgggngtagacgggctt

SEQ ID NO: 4558 - DNA, 407 bp, Homo Sapiens
  misc_feature (349)..(349): n is a, c, g, or t
ggcacgaggcttctggccagggaacgtggaaggcgcaccgacagggatccggccagggagggcgagtgaaagaaggaaatcagaaaggaagggagttaacaaaataataaaaacagcctgagccacggctggagagaccgagacccggcgcaagagagcgcagccttagtaggagaggaacgcgagacgcggcagagcgcgttcagcactgacttttgctgctgcttctgcttttttttttcttagaaacaagaaggcgccagcggcagcctcacacgcgagcgccacgcgaggctcccgaagccaacccgcgaagggaggaggggagggaggaggaggcggcgtgcanggaggagaaaaagcattttcactttttttgctcccactctaagaagtctcccggggat

SEQ ID NO: 4559 - DNA, 399 bp, Homo Sapiens
gcggccgctcacaacatgcacagcctggcgacggctgcggtgagtggctgggcccccaggcttggaaccagaatcctttctcagacccacgtttcggccttctctcctaattcccggtgtcgggtccctagtctgatttttttctgccctcaatctccaaggccccggttcccctcctcggcacgctttggttgtggtggagccggcccctatttccttgccggacgcctctcgcggccttcagcgcgacccatcgcgttctttgcgggcgccggggcctggtcccacgcccgtagcaggccattcattgatttattgcgctgaccaacagtttcagggcgccagttgtgttctgggcgccggcgtcgatgaggggaattccatggtcaatctgacgcg

SEQ ID NO: 4560 - DNA, 723 bp, Homo Sapiens
aagctagtacgaggctggttggaatcggccgaggccacagaaggcatggtctccccacggatgtccgggctcctctcccagactgtgatcctagcgctcattttcctcccccagacacggcccgctggcgtcttcgagctgcagatccactctttcgggccgggtccaggccctggggccccgcggtccccctgcagcgcccggctcccctgccgcctcttcttcagagtctgcctgaagcctgggctctcagaggaggccgccgagtccccgtgcgccctgggcgcggcgctgagtgcgcgcggaccggtctacaccgagcagcccggagcgcccgcgcctgatctcccactgcccgacggcctcttgcaggtgcccttccgggacgcctggcctggcaccttctctttcatcatcgaaacctggagagaggagttaggagaccagattggagggcccgcctggagcctgctggcgcgcgtggctggcaggcggcgcttggcagccggaggcccgtgggcccgggacattcagcgcgcaggcgcctgggagctgcgctgctcgtaccgcgcgcgctgcgagccgcctgcggtcgggaccgcgtgcacgcgcctctgcccgtccgcgcagcgcccctcgcggtgcggtccggggactggcccctggcaccgtcgaggacgatgtgaggccccgtcgtgtgccgacaggtgacccgaactggtc

SEQ ID NO: 4561 - DNA, 436 bp, Homo Sapiens
gcggccgcgtgcgcggacgcgctgttccctactgcgtggcggaggtcgccgcaggccccatcgcgctgccggggccgtgccggcgaggatggctcagggacgcggtcacctcccgccgcttgcagcagcgccgatggacccaagccggggcacgcgccggcgacgacgacccgcatcggctcctccagcagctcgtgctctcgggaaacctcatcaaggaagccgtgcggagactccaacgagccgtcgccgcggttgcagccacgggccccgcaagcgcccctgggcccgggggaggccgcagcggacctgaccgcattgccctgcagccctcaggctccttgctctgacgcaggcctcctggaggaggaagtggaggccgctgcgtagacccaacagcgtccagttcctactaactctgagctgaagccgacgt

SEQ ID NO: 4562 - DNA, 450 bp, Homo Sapiens
gcggccgctctatggtggggccgcgttagtggctgcggctccgcgggactccagggcgcggctgcgaggtggcggggcgccccgcctgcagaaccctgcttgcagctcaggtttcggggtgcttgaggaggccgccacggcagcgcgggagcggaagatgttggagctgaggcaccggggaagctgccccggccccagggaagcggtgtcgccgccacaccgcgagggagaggcggccggcggcgaccacgaaaccgagagcaccagcgacaaagaaacagatattgatgacagatatggagatttggattccagaacagattctgatattccggaaattccaccatcctcagatagaacccctgagattctcaaaaaagctctatctggtttatcttcaaggtggaaaaactggtggatacgtggaaattctcactctaactatgatct

SEQ ID NO: 4563 - DNA, 440 bp, Homo Sapiens
  misc_feature (431)..(431): n is a, c, g, or t
tttttttcaaaaaaaaatttttttaatggggttggggggaacaaaaaggaaaataattgctgaggtaacttcataccttgaggtagtttacttcgcacacagcattgcctgactacccccacatgttgcggttgtcttgttgttactgttgttgcaatgttgaaaggaggggaactccacgcatgggcttttccatatgtagagaggccttcctcccttcccagcacacttgatagcattgtccagggtagctaaagtgcattacctggctaatatgcattgtcaatcagtatattaggaggagaggcctaacctcatttaactgatggcttctgtctcccacaagggctaaacactccatgggatcttaattaagcctggtaaattaataaattaagcttatttaccccttgctgtacaatgctgctggnattctgaat

SEQ ID NO: 4564 - DNA, 2887 bp, Homo Sapiens
gaattcggcacgaggagcgatcgagggagctgagccgagagaaagagccgccgggcgctgcctcgccagacctcgctgggaccccggggccaccgggaggcacttttgtggaggggggagggggggcgacctcggcagcctcggcgcacgaagcgtccgagggcagcgtggggygggctgcgacctctgcatcggtggactgcatttttaattaaggattcccagcagctctttgggatttttacagcttccactcatgtgttgacacccgcgtccaggagaaactcgctccaagtgcatctagcgcctgggacctgagacggcgttggcctttcgtgcatgcaaatccagggatttaggttttgtttgggatttccttttctttctttccttttttttttctttttgcagggagtaagaagggagctgggggtatcaacaagcctgcctttcggatcctgcgggaaaagcccatgtagttaagcgctttggtttaaaaaaaaggcaaggtaaaggcagggctttccagacacatttaggggttcgcgcgagctttgtgctcatggaccagccgcacaacttttgaaggctcgccggcccatgtggggtctttctggcgggccgcctgcagcccccctaaagcgcggggggctggagttgttgagcagccccgccgctgtggtccatgtagccgctggccgcgcgcggaatgcggcttcgcgtgcgcgtgttcccggccgtcccgccttggcgaggtccctcatgttgttgccctgcggcgcccctttgaagacaggctgtgcgcggtttgcacggcggtccgcggcggaggttcatgtgggggtgcgacccgcgcagccggcgccttgttgagggaacggacccccggtaaccggagaccgcctcccccccacccctggcgccaaaggatattgtatgttcaggtccaaacgctcggggctggtgcggcgactttggcgaagtcgtgtggtccccaaccgggaggaaggcggcagcggcggcggcggtggcggcgacgaggatgggagcttgggcagccgagctgagccggccccgcgggcaagagagggcggaggctgcggccgctccgaagtccgcccggtagccccgcggcggccccgggacgcagtgggacagcgaggcgcccagggcgcggggaggcgccggcgcgcagggggccccccgaggcccatgtcggagccaggggccggcgctgggagctccctgctggacgtggcggagccgggaggcccgggctggctgcccgagagtgactgcgagacggtgacctgctgtctcttttcggagcgggacgccgccggcgcgccccgggacgccagcgaccccctggccggggcggccctggagccggcgggcggcgggcggagtcgcgaagcgcgctcgcggctgctgctgctggagcaggaactcaaaaccgtcacgtactcgctgctgaagcggctcaaggagcgctcgctggacacgctgctggaggcggtggagtcccgcggcggcgtgccgggcggctgcgtgctggtgccgcgcgccgacctccgcctgggcggccagcccgcgccgccgcagctgctgctcggccgcctctttcgctggcccgacctgcagcacgccgtggagctgaagcccctgtgcggctgccacagcttcgccgccgccgccgacggccctaccgtgtgctgcaacccctaccacttcagccggctctgcgggcccgaatctccgccacctccctactctcggctgtctcctcgcgacgagtacaagccactggatctgtccgattccacattgtcttacactgaaacggaggctaccaactccctcatcactgctccgggtgaattctcagacgccagcatgtctccggacgccaccaagccgagccactggtgcagcgtggcgtactgggagcaccggacgcgcgtgggccgcctctatgcggtgtacgaccaggccgtcagcatcttctacgacctacctcagggcagcggcttctgcctgggccagctcaacctggagcagcgcagcgagtcggtgcggcgaacgcgcagcaagatcggcttcggcatcctgctcagcaaggagcccgacggcgtgtgggcctacaaccgcggcgagcaccccatcttcgtcaactccccgacgctggacgcgcccggcggccgcgccctggtcgtgcgcaaggtgccccccggctactccatcaaggtgttcgacttcgagcgctcgggcctgcagcacgcgcccgagcccgacgccgccgacggcccctacgaccccaacagcgtccgcatcagcttcgccaagggctgggggccctgctactcccggcagttcatcacctcctgcccctgctggctggagatcctcctcaacaaccccagatagtggcggccccggcgggaggggcgggtgggaggccgcggccaccgccacctgccggcctcgagaggggccgatgcccagagacacagcccccacggacaaaaccccccagatatcatctacctagatttaatataaagttttatatattatatggaaatatatattatacttgtaattatggagtcatttttacaatgtaattatttatgtatggtgcaatgtgtgtatatggacaaaacaagaaagacgcactttggcttataattctttcaatacagatatattttctttctcttcctccttcctcttccttactttttatatatatatataaagaaaatgatacagcagagctaggtggaaaagcctgggtttggtgtatggtttttgagatattaatgcccagacaaaaagctaataccagtcactcgataataaagtattcgcattataaaaaaga

SEQ ID NO: 4565 - DNA, 368 bp, Homo Sapiens
  misc_feature (42)..(42): n is a, c, g, or t
  misc_feature (82)..(82): n is a, c, g, or t
cgaacctcaggttgcatcagtggctggaatctatcacagctnttggggatacgtaactcccagcaataaatccagtattttnttccctgccctgagcttcctctgggtttcttatcagcagctattacacacagatgtccagtgcttctaaactaaattgtactgtgtaacttttacatcacacttgtgtgcttaaaaagcacaccgtgggtagtgactgggccaagagacatcacaaagcttcctgataaatttgaatccagccacggcaagagcgacgtgcgggtacctgggtccctgatgcttgggtgccccgttgagcctcgggtacttcttggacactattgtgagagcagccatcctggtgt

SEQ ID NO: 4566 - DNA, 1071 bp, Homo Sapiens
gcagttctggtcctcctaggagcggccgcctgcgcggcgcggccccgtggtcggatgctgggcggcagagaggccgaggcgcacgcgcggccctacatggcgtcggtgcagctgaacggcgcgcacctgtgcgcaggcgtcctggtggcggagcggtgggtgctgagcgcggcgcactgcctggaggacgcggccgacgggaaggtgcaggttctcctgggcgcgcactccctgtcgcagccggagccctccaagcgcctgtacgacgtgctccgcgcagtgccccacccggacagccagcccgacaccatcgaccacgacctcctgctgctacagctgtcggagaaggccacactgggccctgctgtgcgccccctgccctggcagcgcgtggaccgcgacgtggcaccgggaactctctgcgacgtggccggctggggcatagtcaaccacgcgggccgccgcccggacagcctgcagcacgtgctcttgccagtgctggaccgcgccacctgcaaccggcgcacgcaccacgacggcgccatcaccgagcgcttgatgtgcgcggagagcaatcgccgggacagctgcaagggtgactccgggggcccgctggtgtgcgggggcgtgctcgagggcgtggtcacctcgggctcgcgcgtttgcggcaaccgcaagaagcccgggatctacacccgcgtggcgagctatgcggcctggatcgacagcgtcctggcctagggtgccggggcctgaaggtcagggtcacccaagcaacaaagtcccgagcaatgaagtcatccactcctgcatctggttggtctttattgagcacctactatatgcagaaggggaggccgaggtgggaggatcattggatctcaggagttggagatcagcatgggccacgtagcgcgactccatctctacaaataaataaaaattagctgggcaattggcgggcatggaggtgggtgcttgtagttccagctactcaggaggctgaggtgggaggatgacttgaacgcaggaggctgaggctgcagtgagttgtgattgcaccactgccct

SEQ ID NO: 4567 - DNA, 1584 bp, Homo Sapiens
actctgggcgaggccgcccctatcccagccgcaccggtccttcccggcacacgcgaggctcccatggctctggcggtggccccgtgggggcgacagtgggaagaggcccgcgccctgggccgggcagtcaggatgctgcagcgcctagaagagcaatgcgtcgacccccggctgtccgtgagtcccccttcgctgcgggacctgctgccccgcacagcgcagctgcttcgagaggtggcccattctcggcgggcggccggcggaggcggccccgggggtcccggcggctctggggactttctactcatctacctggccaatctggaggccaagagcaggcaggtggccgcgctgctgcctccccggggccgaaggagtgccaacgacgagctcttccgggcgggctccagactcaggcgacagctggccaagctggccatcatcttcagccacatgcacgcagagctgcacgcactcttccccgggggaaagtactgtggacacatgtaccagctcaccaaggcccccgcccacaccttctggagggaaagttgcggagcccggtgtgtgctgccctgggctgagtttgagtccctcctgggcacctgccaccctgtggaaccaggctgcacagccctggccttgcgcaccaccattgacctcacctgcagcgggcacgtgtccatcttcgagttcgacgtcttcaccaggctctttcagccatggccaacactcctcaagaactggcagctcctggcagtcaaccacccaggctacatggccttcctcacctatgatgaggtccaagagcgtctgcaggcctgcagggacaagccaggcagttacatcttccggcccagctgtactcgcctggggcagtgggccatcggctatgtgagctcagatggcagcatcctgcagaccatccctgccaacaaacccctgtcccaggtgctcctggagggacagaaggacggcttctacctctacccagatggaaagacccacaacccagacctgactgagctcggccaggcagaaccccagcagcgcatccacgtgtcagaggagcagctgcagctctactgggccatggactccacatttgagctctgcaagatctgtgctgagagcaacaaggatgtgaagattgagccgtgcgggcacctgctctgcagctgctgcctggctgcctggcagcactcggacagccagacctgccccttctgccgctgcgagatcaagggctgggaggccgtgagtatctaccagttctacggtcaggctactgctgaggactcagggaacagcagtgaccaggaaggcagggagttggagctggggcaggtgcccctttcggctcctccattgcccccacggccagatctgccccccaggaagcccagaaatgcccagccgaaagtgagactcctaaaggggaactcccctccagctgcgctgggaccccaggaccctgccccggcctgaaggccagggcacccagatgtgctgctcaagggagccccaagggctggaagggggttgtgaaaccgaaataaactgccaagcctggtctgtccacca

SEQ ID NO: 4568 - DNA, 286 bp, Homo Sapiens
aacatcacagggaacttctttcccctcgcaggcttcgctagtgatggacccatacatgattcagatgagcagcaaaggcaacctcccctcaattctggacgtgcatgtcaacgttggtgggagaagctctgtgccgggaaaaatgaaaggcagaaaggccaggtggtctgtgaggccctcagacatggccaagaaaactttcaaccccatccgagccattgtggacaacatgaaggtgaaaccaaatccaaacaaaaccatgatttccctgtccattggtgagttg

SEQ ID NO: 4569 - DNA, 404 bp, Homo Sapiens
  misc_feature (29)..(29): n is a, c, g, or t
  misc_feature (32)..(32): n is a, c, g, or t
  misc_feature (35)..(35): n is a, c, g, or t
  misc_feature (38)..(38): n is a, c, g, or t
  misc_feature (247)..(247): n is a, c, g, or t
cggtgtcggaccgcgcgcgccagtggatnatntanatncgtacttgcatgagctttccacccacttgagcccagtcctccgggccgttcctcgcccccacccctgtctggcgtgaccccagcctcagcctctttctaagggacttcctcagcacatttgtatttttatatccgactctttgtttactggctctgctcatgggttcctgccctcccctcagtctcggccacgctcttctgcgcctggnagataggatgggtgttgaggctgggatgagacaagcccccgacacggttaccaaccacatgggccagtctgcccagggctgaccccagggaggctttctgggcagaccccttctccccaaggtatcatcacttttccaaggggcccagattccgatt

SEQ ID NO: 4570 - DNA, 271 bp, Homo Sapiens
ccgagggtgtggaccccagcaggaaggaggaacacctgtccattgaagatttcactcaggcctttgggatgactccagctgccttctctgctctgcctcgatggaagcaacaaaacctcaagaaagaaaaaggactattttgagaagagtagctgtggttgtaaagcagtaccctaccctgattgtagggtctcattttgtcaccgatattagtcctacaccaatttgaagtgaaatttttgcagatgtgcctatgagcacaaacttctgt

SEQ ID NO: 4571 - DNA, 148083 bp, Homo Sapiens
aagctttattgctttatactttacatgtaagtggtgatatgcctcaaatctttttttttttttttttggagacagggtctcgctctcttgctgcccaggctggactgcagtggcaggatcatggctcactgcagcctcaaccttccaagctcaagcagtcctcctaccttggctgggcctacaggcttgcaccaccacacctggctgattattttagcagttggatctcactatgttgcccaggctggtcttgaacttctgggctcaagtgatctacctgcttcagcctcccgaagtgctgggattactacaggcatgagccacggcacacagcctgagtttacttttagaattcatttgttggaaggaagtctaaggagactcgcaggctatggctagctaattagtagttggtttctatgtgaatatctgtttattaataacatatttggccaggcacagtggctcatgcttgtatcccagcactttgggaggcggagatgggtggatcacaaggtcaggagttcgagaccatcctggccaacagtgtgaaaccctgtctgtactaaaaatacaaaaaattagctgggtgcagtggcatgtgcctgtagtcccagctactcaagaggctgaggcaggagaatcacttgaacccgggaagcagaggttgcagtgagctgagatcgcaccactgcactctagcctgggtgacagagtgagactccatctcaaaaaagagaaagaagatggtaaaaaataacttactgcagtcatcataagcccccattttagtccttttgggctgctgtaacagaacaccatagaccagaaaggcaaaacagcaggaatgtgtttctcacacttttggagctggaaagtttgagctggagatgggggagacagttgcctcctccccagctccctagtgagggccccctctcggctccttctcactgtggcctcctccccagctctctagtgagggccgcctctcggctccttctcactgtggcctcctccccagctctctagtgagggccccctctcggctccttctcactgtggcctcctccccagctctctagtgagggccgcctctcggctccttctcactgtggcctcctccccagctctctagtgagggccgcctctcagctccttctcactgtggcctcctccccagctctctagtgagggccgcctctcggctccttctcactgtggcctcctccccagctctctagtgagggccgcctctcagctccttctcactgtggcctcctccccagctctctagtgagggccccctctcggctccttctcactgtggcctcctccccagctctctagtgagggccccctctcagctccttctcactgtggcctcctccccagctctctagtgagggccccctctcagctccttctcactgtggcctcctccccagctctctagtgagggccccctctcggctccttctcactgtggcctcctccccagctctctagtgagggccgcctctcggctccttctcactgtggcctcctccccagctctctagtgagggccgcctctcggctccttctcactgtggcctcctccccagctctctagtgagggccccctctcagctccttctcactgtggcctcctccccagctctctagtgagggccccctctcggctccttctcactgtggcctcctccccagctctctagtgagggccgcctctcggctccttctcactgtggcctcctccccagctctctagtgagggccccctctcggctccttctcactgtggcctcctccccagctctctagtgagggccccctctcagctccttctcactgtggcctcctccccagctctctagtgagggccccctctcagctccttctcactgtggcctcctccccagctctctagtgagggccccctctcggctccttctcactgtggcctcctccccagctctctagtgagggccgcctctcggctccttctcactgtggcctcctccccagctctctagtgagggccgcctctcggctccttctcactgtggcctcctccccagctctctagtgagggccccctctcagctccttctcactgtggcctcctccccagctctctagtgagggccgcctctcagctccttctcactgtggcctcctccccagctctctagtgagggccgcctctcagctccttctcactgtggcctcacgtggtagaagagctgggctagttctctggggtccggtttttaagggcactgagctcatcattagtgctctgcctcctgacctagtctcccgcaaaggccctgcatcttaataccatccccgtaggggataggatttcaacataggaattttaggagtcagacattctgaccatagcagccctgcatgctgggaacacgagctggtgcctgtggggtcggggcttgggatcgagtcccagcctcaagtgtgtggcctcagagagtacctctctcttaccttttattacagaattttcaaacatacagcagagagctggtaggtaaggagccgtagcttcagcgggtcccctgtcagctgactctgtttccctctgggccttgctgggccgcggggacggtctgtgctggtgtgtctggctggtgctgcacatgtgcaggtggcagctggcacgatgccctttctgtccattcttttggggtcttggcttggcccaggcctcagctctggggacagtgaccagccttccacgtcagctcagctggactgcaggcctcagagctgtatgagctctaggcaggtggccttaggtgctcaaggtggcagggccacagccgggctgggggctccatgtgatgctgctgactgccaggggcctggcagtgtgaggcttgacctggacctgccagactgtgtaccctggccaccggcttccttgggatgcaggctcagcagctgcccacctctggctgctggtcatcattagtgaagtttggcgtgagcaaaacatcagccctcactttctccagctcatgtgcccttatcaaataaatctgggaggtcagtttttgactttatatggggatggaggccgcctcgggtagtctttgcaggaggactgtgggtttgggtgccagaggatgcagtgggaactggaatctccatggcggcagcattcctctgcatcgagccgtgacccaccacacatgtcctctgggtaccccatggggctaattgcctggagcaaggactctgcctgcccacgacgcccactgtgcagacagaagtgggggcagtaaagttggctcaggtgctccccacacagcctgtgctctgcagacagaagtgggggcagtgaggttggcccaggtgctccccacacagcctgtgctctgcagacagagtggggcagtgaggttggcctgtactctgcattgacatttgtttcccaaggttcctcctgcctgcagggcagctttgccatttccctcctgatgccatcatgtggcccgcagctttgggagggtcttgctccagggaggcgcgtgtgctcggatgttgccgtcctggccacctccagcacctcgcagcccctaggagggcgcagtggcctccggtctgctgggcatgcccttaccatggtgaaggggtggcctgcccctccacacctgtgggtatatctcgtcaggtgggacgagagactgagaaaagaaatgacacagagacaaagtatagagaaagaacagtggggccaggggaccggcactcagcataccaaggacctgcaccggcaccggtctctgagttccctcagtttttattgattattattttcactatctcagcaagaagaatgcggcaggagagcagggtgatagtggggagaaggtcagcaagaaaacatgtgaaccaaataatctgtgtcataattaagttcaagggaaggtactatgcctggatgtgcacataggccagatttatgtttctctccgcccaaacatctcagcggagtaaagaataacaaggcagtattgctaccaacgtgtctaatctcccgccatagggcggtttttctcctatctcagaattgaacaagtgtacaatcgggttttatatcgagacattcagttcccaggggcaggcaggagacagaggccttcctgtatctcaactgcaagaggccttcctcttttaccaatccacctcagcacagacccttcacgggtgtcgggctgggggacggtcaggtctttctcatcccacgaggccatatttcagactatcacatggggagaaaccgtggacaatacccggctttccagggcagaggtccctgcagctttccgcagtgtattgtgcccctggttcatcgagactggagaatggcgatgacttttaccaagcatactgcctgtgaacactttgttaacaaggcacgtcctgcacagccctagatccctgaaaccttgattccatacagcacaggtttctgtgagctccaggttggggcaaagtggctggggcagagttacagattaacacctcagggcaaagcagttgttcagggcacaggtcaaaatggagtctcttatgtcttccctttctgcatagacacagtaacagtctgacctctcttccttttccctacaccatggccctccctctgggcaggtgcaggggatggcgctagcctggctttttctcaggccgggtggctggctcttagaggagaggctggcgggcgcagggctgagcagaatgggccctgctgagaagggacgggtgggctgacccagactctgtgcggttggggaaggcggtggcgctggggcatgtggctgtaggaaaaggggcattcccactgtagcccagggcagtcaggggcatagcacctgccagccagcccaaaccaagcccttgccagacacgccgcacctcagagccctggagagaggcacattcagccacaccgcacatgccactcagagcctaaagaagggaaacaggtagaacaggatctcatggcacatggagatcacagaaaattcacatttcagtgtccttaaataaaaagtgattggaacccacatataaaaagtgagctcagaaacttacaaggaaaagcacaaatctatattcttaaagttgctgctgtggccgtgtgatacttttcatgttctgtgggaacatttggctaagagctgcctcgtgctgtgtcctagggaggcgccacatccaccacctggggaaccagctgcagctgaaccagcactgcctggacaccgccttcaacttcttcaagatggccgtgagcaggcacctgacccgcggccggaagatggcccacgtgattgctgcctgcctctacctggtctgccgtacggagggcacgccgcgtatcctttggtttgagagcctcccagagggccccatcttgatgcttagttggctcccctcgaatattgggacttggtagttgcagtaacttggtgtttgtctttaatagaaaaacaccttactggaagaactgtttcagttgatccagggctttctgaatttggggtctccttttactggatcgaagaactggggagctgggcacctgccttcctcgcacagcccttgggcatgcagagcgagggttctgtcggtgcctgagaatcatgccctggattctccccacttgtggacctactgcgccttgggtgctgtctccacgtcccctgtggttcaggccgccctctggcctgagcaggtggggtgctgttgctgagtgggctgcagccaggcgtacaccgagtgcctgcagctgtggacaccgtgactgtgggcgatgggtggggaggccgccgaccctcagcggtgtgcagctcggccttgtgcgtggataccgtgactgcaggcggtgggcgaggaggctgccgaccctcagcggtgtgcagcttggccttgcgtggagatccagtgtctggtgttctcttgcactggtctctgtgcatctggtcctgtgcccactgctgccatctgcagacacacacatgggtcaggagctgccttcggcctcttgacagggagcccagagccttccagcctcctctgctctgtgctgtgctgtccacacctgctgtgcacctgcatcttttccctgctctctggggactccccgcttcctggtccacaccctcctcatcttgtgaggtgcctcctgcaatggctccctgggagagggaccttttccgagctgcgcccctctgaaggtggtccccctccctgccctgtgtctggtgggcgtggcgtgcccggccacacgtctgcctcccagcctgcgcccctgccgtcgccttgcctccagcattctcactgggcagttctgtggccctctggctcctggcccttgctgtgcagctgcggggcttcagctccttgcctctaatctccacgttcagaaatctcacggcagtgtgagcccatcaggcctttgctctctgacagcttcctgtcctgagcttctgttgaattcgtcgttagatgtgtctcccttcttctctgttactctgcctgccacactgaacccatgtgttatctcatccttttttgcacgtggctatctttttgctttgggacagcacctgaactttagcttccagcaggctgtttcatttctttcatgtttttcatctctaagagctctgggtcttttccgaatcttttttataatctcccgtcttcctgagtgtggcatcttctcaccttgagctcttttctgtcttggtctgtttttctggttggtccccctcgaggggtgtcctgggtgccaggtgatcctggtggcttgcttctcttttgagtggggtgcagggagggctcctggagatgacgagctggtagcctgctgacggtgcctctggccaggcaaccctcagtatcaggatctttcattaaaatgttactttttttttttttttccagacagggtcttgctctgtcacccaggctggagtgcagtggtagtatctcagcttactgcaacctctgcctcccaggttcaagcaattcttgtgccttagcctctcgagtagctgggattacaggtgtgcaccaccatacctggctaatttttttgtatttttagtagagatggggtttccccatgttggccaggctggtctcaaactcctggcctcaagtgatccacccgccctggcctcccaaagtgctgggattataggcatgagccactgcatccaaccctgaaaatgtccttttaacattttgaaatttgggctgggcatggtggctcacgcctgtaatcccagcactttgggaggcctaggtgggcggatcacgaggtcaggagatcgagaccatcctgtctaacaccatgaaaccccgtctgtactaaaaatacaaaaaaaattagccgggcgtggtggcaggctcctgtagtcccagctactcgggaggctgaggcaggagaatggcgggaacccgggaggcggagcttgcagtgagccgagatcgcgccactgcactccagcctgggctacagagtgagactccgtctcaaaaaaaaaaaaaaaagtcctttcaacattttgaaatttgtcatttctgcgtaaaagtgtttaaagcacacgtgtgcctttagggacagggatgatgcagagtgcccaggcagcccactgcagggcgagagacagagcccacgcccgcatccctgcccgccccgcctgctgtctgcttgccccggctccaccctggggtcccactgagaggcctgctccgatcctgctctcttagaagcagaccaaggtcctgagcgagaagctgagcagagcccagggtcagcccatggccctgcctcccttgtgtttgtaggagctgtgtggggactgctgtggagcagggcctagggtgcaggccggcactgggaccccagcgtcagcaaggtggggtggcaccacgtccatgctgctgcctcaccgggcctcctgtgggggggacagatgccctgggacatgggccttcatggggtgatgacaggcaggacggagagcagtcctgtggcactgccggggctgcctctgagtctggcaggaccacctttagccacaaagttcccacacgctccagcgatcctcctactaagtgtgtgcccaagggaaaagagtacctgtgtccccaccgaggctcacgcacagtgctcacagtggcagcatccaggaagccaccccgtgtcccccacgcattctaaaattagatcctggtggtggttgctcagctctggggatttacgaaaacccactgcccggtgcactgtgaacaggcaggtttgtggcacaaacttgtaccttataaagctgctaaggacaagacagcttggaacaggactgtgctcacgggaggccgcactctatcccctctggctgctggtggcctggtggggctcccttcagcatcctcagaggatgcttcgggctggtctcgggtagctgtagccctcacttcccagcccacccctgctttgccggcactttagagggaagtgggtcaggccaggtgtagcatgtcccgctctgccctcccttcaggttgcgggcagcaccgtgccctaggcctgccagccagagcccccagacccatcctggacacgtctccgtctctcactgccctccttgttttctcctgcccctgtgccttctccctccctgctgacctgcattggctctggccactgtcctcgcctcctgcagccccagctggctggctgggctcatgtgctgcctcagtttcctcaatagctccacccacttcccttccacagaaaatccacccaggagagggtgtgtgcagccaggctctcttctccgagacagggctgcttggcccagccctgctgcctgcacagctcccgtcaccttctggactcgccacctttagccagggcgcaacagcacccaccaccccacctccaccctgccgtcagcaggacgtggagggtcctgtgcagtgagcttacgttgtggggtgcatggcccccaccccaggagaggccccccaggatcctcctatcgtatcgtccagcccatgggtgggaccagtgccctgagcccagggctggatacaagaaatcctctctcagaaggaacaagggcttgatttaagaacatccaagcttattcctccttctgcccacccttcattgttgcccgatcctcaggtgtgtccactatcaccccgaaagtgccgggggctgtgcacacacacctcctctcttggccccgtagcctggtggctgacacagccagtcccggattcctggaggaggaacggggtgctgctgagtcccactgagtctggcaaggcccggctgaccctaggcctgagtctgctcctggctcccagcccagggaggctgcgtgggcagcagggctgagacacgggacctggacatgccgggcagagactcagctggaatgagcacctctgccattgtcgagcaggtagtttgtggccagtgtgctttttctggctgtgtgtctcgacttgttattgcagcttttgcccacagctggtttgtgggtctttgacatttgttcctgtccagccaggctgccctaggcctgcatgtgagagggcatcttgggatggtgacaggctggtgagccctagagggcgtcagagccctggggccagcactgtggatggtgccatcacctgtccccacgtaggtctgcaaagagcatgcccagcttccatggcctgccagcctcagcctccatggcgtgcctggccacgcgtgggagcaaggcctctgccgccagccgccacactcccttcagacccagctcctctctcaggctgcagaaccgtccgttcaggtcagcaggggccatgtgcattcagcttattccattctggggtctgggatgggctttcagagcccacacttctctgcccccctgttctggccagcacctccttctgccaccaggcccccttgttcctgctcctctccctctgctgccttctcaaggacagggcatttataacagtttaagtggtcagaagaaggtattaggatggctgatgagggaatcaaatggtgcacacatcattaggcatgaagacgttggcatttcaggtcaggcacagtggctcacgcctgtaaatcccatcacttcgggaggcccaggcaggaggattgcttgagtccaggagtttgagaccagcttgggcaacatggtgaaaccccgtctctacaaaagaaaaagaaaacaaaaaaaaaaaatccagctggtggtgtgtacctgtggtctcacctactggggaggctgaggtgggaggatcgcttgaacccaggaggtcgaggctgcagtgagccatgatcgcaccactacactccagcctaggcaatagagtgagccccgtctcaaaaaaaaaaaaaagttgccatttcagacttccgaaaggctgacctggaaacaccggcacacccagcgtgggcccatgtgggccccttgtcggtggtgtcttgttgctggcgtagcagaggtttagctgagttttgtatgttgacattattaatacatcattcctaccaaattcaattgtcgatcttactgtttgagttttggagtctctcctttaatgcacacaactgtgtctgctgctcataatgccagttctgcttctttcttttcatttttttcatgagacaggatctcacttgatcacccaggctggagtgcagtggcgcagtcttggctcactgcagcttctgcctcccaggctcaagtgatcctcccacctcagcctcccgtgtagctggactacaggcatacaccaccacccctggctaatttttgtactttttgtggcgacggggttttgctgtattgtccaagctggtctcaaacttctgagctcaagtgatctgcctccctcagtctcccaaagtgctgggattctaggtgtgagccccccgcccagccttggttcttcctttctaacccacacacctctcatctgtttgtcctgccttttgtatgccgaggactcagcatggtcctggggagggagatgtgcctggctctctcctgtcctgggaggggtgttttctgcccttcgctctatgtatctgcggtagacttttgtgtataggactctttatcagcttgaggatgttaccttgctttctaattttccaagagtttttgtcatgaaaaatactgaattttatcaaacaccaatgtatttattggtatgattttttcatgtacattttccccttaatctgttacctaacgtaaataacactgattaatttttaaaaattttttagaaacagggtcttgctctgttctcccaggctgtaccactgtggcacaaccctagctcgttgcaacctccaactccctggctcaggcgactctctcgcctcagcatcccgagtagccgggaccataggtgcactagagatggggtctcactgtattgcccaggctggcctcaaactcctgggttccagttatcttctcatgttggactcccaaagtgttgggattacaggtgtgagctattgtatctggcctgttttttctaacataagcactcgaggctataaatttctctctaggtgagtttcgttacatcacacggttttttgtttgttttgtttttttttgagacagagtctcactgcctcacccaggctggagtgcagtggtgccatctcggctcactgcaacctctgccctctgggttcaagtgattctcctgcctcagcctcccgagtagctgggattacaggtgcatgccaccatgcccacctaattttttttttttttttttttttgagagggagtcttgctctgtcgcccaggctggagtgcagtggcatgatctcagctcactacaagctccgcctcgcgggttcacaccattctcccgccccagcttcccgagtagctgggaatacaggtgcccgccaccacacctggctaattttgtttttgaatttttagtagagaaggggtttcactgtgttagtcaggatggtctcaatctcctgacctcgtgatccatctgcctcggcctcccaatactgctgggattacaggtgtgagccactatgcctggcccatgcccagctaatttttgtatttttagtagagaggggtttcaccatgttggccaggctggtctcaaactcctgacatcaggtgatctgcccaccttagcctcccaaagtgctgggattacaggtgtgaaccactgcacccggcccactacctgcttttaagaaatatttttgtgtttggatttggcagtttgactctgatgtacctagatgtggttttctttgtgtttatccagattattttttgtagaagttcaaggatttgtgacttggctgggtgtggtagtttatgggtgtaatcccagcgctttgggaggctgaggtgggtggatcacttgaggccaggagtttaggaccagcctaggctaataaaagaaattagccaggtgtggtggtgcacacctgtagtcccagctactcaggaggctgaggcaggaggatcacttaagcccaggggtcaaggctgcagtgagctgtgatgacatcagtgcatcagtgcattccagcctgggcgacagagtgagaccctgtctctaaaaaaaaaaaaaaaaaaaaaaaaaaacaaaaaaaaggataagtagaacttatgacttgatgtcttttgtctacgttggagacatcttgggtagtatcttttcaaataaagtttctgctccactctctcttcctgttctgggactccatatattagcctttctctcttttgctcatcctttcttttgctgtgtctaatcaggtgttgaacccatctactaacttcttaatttttttttaagagatggaatatcgctgtgttgcccaggctggagtgcagtggtgcagtcacagctcactgcagccttgacctcccaggctcgagcaatcctctcacctcagcctccatagtagttgggactacaggtatgcgccaccacactcactcaatttttttttttttttttttttgagatggagtctcattctgtcacccaggctggagttcagtggcacaatctcagctcactgcatgctctgcctcccgggttcatgccattctcctgcctcagcttcccgagtagctgggactacaggcacccgccaccatgcccggctaatttttttttgtatttttagtagagacggtgtttcactgtgttagccaggatggtcccgatatcctgacctcgtgatccgcccacctcggcctcccaaagtgctgggattataggtgtgagcaatcgcgcctggccatcaattttttatagagatgaggtctcactgtgttgcccaggctggtcttgaactcctgggctctttattttttgtagagaatggtgtcttgctatgttgcccagcctggtcttgaactcctgggcagaagctattctcctgccttggcctcccaaagtgctaggattatagatgtgagccatcactaagactccttttattagagtccagttctttggtaagattcttcatttcttcatagttaggtgaaagtcattgataagccaaatagttgaatcatttgtggttctgtttttattatcttgattttctttttgtttttgttcctttggtcttgtcttttgtcatgcttggtaatttttcattgaatcgctggaatattaggtctaaaatattacagagatgatggatacttttccatccagagggaatttaacttttctttttttttttttttgagacagagtctcactctgttgcccaggctggaatgcagtggcaccatctctgctcactgcaagctccgcctcccaggttcatgccattctcctgcctcagtctcccaagtagctgggactataggtgcccgccaccacatccggctgattttttgtatttttagtagagacagggtttcgccgtgttagccaggatggtctcgatctcctgacctcgtggtccgcccatctcacccttccaaagtgttgggattacaggcgtgagccatcacgcccggccgggaatttaacttttcttgagcaagcagagagcacgcaggtagctcactctgatccagttgctgctggtccgtcttggttcccggctgaaggatcgtggcaggacccaggtgtcccttcctggcacctcgggactgcagaacttcctgctcggctcttttgcctttcagagctgacttctgggcttggtgggcctcagcctggtgcctgtggctccaggggcggcagctgccgtaaagggactaagtgcactgtgccctgctcgcttgttgaagttgcttcctcttctcttggcagcttggcccctcgtgtctggctggctcggaagccactgaactgtaaactctatcttcccttgccaagcgagactgtgagcactaggctcctacttttttttttttttttttttttgatggagtcttactctgttgcccaggctggagtgcagtggtgccatctcggctcactgcaacctctgcctcccgggttcaagcgattctcctgcctcagcctcccgagtagctgggattataggtgcccgccaccatgcctggctaacttgtatttttagtagagatagggtttcaccatattggccaggctggtctcggactcttgacgttgtcatctgcccgcctcggcctcccaaagtgttgggattacaggcgtgagtcaccgtgtccagccactttttttttttttaaatggagatggggtcttgctatgttgtccaggctggtcttgaactcctgtcctcaggcaatcctggcctggcactgccagactatgacagcttattagaattggcgagaattggaaggaggcccgagctgagacactgcaccttacactcgtgccactcagctcctcctggggccatccatgtgcctggttgcatgtgtgtgcttgaaagccaggggctgggagcgtcaggtgactgcctggatagcagctgcattatccgtgagaccacctcagtgtggctgggacagagccaggctcccagctctgtgggaggctcagtcttcagagcagggatctttgagaaggcacctgggtacccttgaacttcacagaggccatgcatgatgacagcggtgaggtgctagattattcagggtgtactgcacacaggagcccaccgtggggtgtggcagccagcagtggctcagggatttagtcactgtgcaggggatgggcaaggcccagcaatgacccactggctcttccctggaggtcagaggtatctggacaaagggcagccagcaggtctcctaccccgcatcagtcattcagggactcccagagcacctgctctgtgccacacctccaggcggaggagcagggtggtctctgggaagttcgggagggcagggctgctcatgacctaggccctgggtcttgatgggtcctgctcttggggtgctgagggcatccgagctctggggtgagtgaccccattccaagctaggatccgtcatagccccgtccaggcatgtgcggggcctgaggatgcccagtctgcctgccgggctcctgtgtgggtgcttggtcggccgctgagtgctgtatgctgagtgctgccagggccttgcccttggtgggttggggctgggcactactgctctacacggagcttcggccgggccgtgtgttcccgtgccaggtggtgttggctgccggtgaggagcactcagagcagggggggcctgcagaaggggagtggcactgggtaggggcagtgagccgtgggccggtgcagtgctgggcatcattctccagaaggtgtgggtttcgctccttggtcctcacgccgtgtgggcgccgcagtccccctctccagtcccatggggccgggaatgctggtgtccgctcagggtggggccctgccggcccctgcactgctggctgttgtggacacagccctttctgtggggctctatatacaagagcactttccctcgcttctctctttgggtatccagtaagagcatttgtatgtgaggctgttgagagaaatttcttgtttttttaagttttagttctgccttatgtaaatctctgtaaacttttccatgtaaggaaagtgtgtctgagtcaggacccatctgcagtttttctccctgcaagcatcgtgcagccagccagggtgtgggcagcctcagtttccccatcctcttcacagtggagtggcccctcgctgtgttgtccacagctgtggtggggaagcctggttggttcctggagccgggacagtttgatggcacagcagtggggtgcagggctgcaccgtcatgactggaccatttctgggccttgtcatctgctgatgggagcctcgcgtgggcctctgccgcactcaggaatgtctggcgccctttgagggcattgtgtcacctgccctctactgtgctcccgcgtctctcctttgactggcactcagctgcaccgagcagaagaccacccggcacagcgtggcaggggccagaagggaggcagaaagaggccccagctggcagaatccaggctttcgcaccctgggggccgcagacagggcctcttctctgcagacttttttctgattcccagatggtcagaagcagctgctcagcaaaagggagggactgctgggaggacacaggtaccagccatgctggacacaggagaacctccagagccctgggagctcattagctgggggacctgtaggctgggccccaaaggcattagtgggccctcccgggattggccagagggaatgtgatatcctcacaagggaagcacataattgagcttccatcgtctggaaacttccctgaaagcgcctgatagagccaggtgaatgcggatcaagtgccaggtgattttcatttcaaggaaagcagtaattctaacttcgttaaatgtttaatttgaagctccttttaaaaatgtacacacttatcccattgttttattaagaaaattttctgtggagcttggtggcttatgtctgtaatcccagcactttgggaggctgaggtgagcagatcacctgaggtcaggagtttgagaccagctcggccaacatggtgaaaccccatctctactaaaaatacaaaaaaaaattagccaggcatggtggtgcatgcctgtagtccaagctacttgggaggctgaggcaggagaatcgcttgaacctggtaggcagaggttgtagtgatccaagattgtaccattgcactccagcctgggcgacagggcaagacttcatctcgggaaaaaaaaaaaattcgaacacctgcaaagttgaagtgaattgtggagtcccctcgctcacacctgtggtccgctccccaaagctatgctgccctcaccatcttattttttggcacatttcaaggcaagttgcagacgtctgtgtactgcacacagtccttcagcaggcagaccatcagctcaatgggggtgagcatcgttcctgggtctttttctcctctgaaggtaaagttggcttaaagtgagatgcacaggccctaattgctccatctggagagttctgacaaacggtcacccgtcagcccagagcagggctctgtggacagacctcatgccccttccaacagtcccagccccacaaaaggcaaccgctgtttccatttccttccactacagaccagttgtgcctgttctagaatgccctataaatggaatcatatgatctgtgccctgtcacttcacatgcttttttttttggtgacagaatgtagctctgtcgcccaggctgagtgcagtatggttccatctcagcttactgcaacctctgtctcctgggttcaagcgattctaatgccttagcctctcaagtagttgggactacaggggcacgccaccatgtccagctcatcttttgtatttttagtagagacagggttttgctgtgtaggccaggctggtctcaaactcctggcctcaagtgactgcccgccttggcctcccaaggtgctgggattacaggcgtgagccccgtgtccggtggacatggttttgagaggcgcccatggtgttttgtatggtgagtggtattgctgtgtgaataccagccagagtattcttgtattaatggacacctggactgctccccgtttttggctgttctgaatgaagctgctatgaacatttttctacaagtttttttgtggacatatttctttttatttttagagacagagtctcactctgtggccccagctcagtgcagtggtgcaatcacagctcactgcaacctcgacctcttgggtgcaagcaatcctcctgccttagccttctgagtagctgggacaataagtgtttgtcaccatacccggctaatttttggatttttttgtagaaacagggtctcactgtgttgcccaggccggtcttgaactcctgggctctggtgatctgctggcctcagcctcctaaagtgctgggattatgggtgtgagccactgcacctggctgacatctgtttttatttctcttgggtaaatacctaggagtggaataggtgggtcagaggtgtgtgtttagctttgtaagaaacttccaggccttttcccaaggtggttgtaccacttcacgcttccatcagcagcatgggtgagctgtgcttgccccacatcctcgccggcattcagtgacgtcgcgggctcgtggcattgtcacagttttgtttgcatttctgatgattaatgcagttgagttctttttcatgtgcttgttggctatttttttttgtcttcatgaagcttctgttgaattgttttgcctttttttattttggcctttattctttttcttatttaaatagagttcttttttttgagactgagtctcgctctgttgcccaggctggagtgcagtggtgcgatatttgcttactgcaacttctgcttcctgggttcaagcaattctcccacctcagcctcccaagtagctgggattacaggtgcccgccaccaccccctgggtaatttttgtatttttagtagagacggggtttcaccatgttggccaggctggtctcaaactcctgacctcaggtgatcctcccacctcggcctcccaaagtgttgggattacaggcgtgagccactgcgcctggccttagagttcatttcttttttttttttttgagacggagtctcgctctgtcgcccaggctggagtgcggtggcgccatctcggctcactgcaagctccgccttctgggttcacgccattctcctgcctcagcctcccaagtagctgggactacaggcgcccgccaacacgcccggctaatttttttgtatttttagtagagacggggtttcaccatgttagccaggatggtctcgatctcctgaccttgtgatccacccacctcggcctcccgaagtgctgggattacaggcgtgagccaccgcgtccagcccagtagagtttatttcttagagcagtcttagtttacagaaaaattgtgtagaaagtacagagttcccatacacccccttcaatccccaatttccctatgttattaacatcttgtgttagctggtccatttgttatggttgatgagcccgtcttgccaagttgttgataagaaaagtccacagttcacattgaggttcactcttggggctgtgccttctatgggttttcacaaatatgcaatatgtgaacccaccagtgcggagtggtgcagagctgcagcgtcctggaaccctcctctcggcccacccaccctgcctttccccagcccttggtggccactgacctaatgctgtctccatagttttgccttttccggaaggtgtatgcttggagtcacacagggtgtagccttctggcctcgttcacttttcccgttggtgtgtgttggctgtcacgggcgtttccccaggtagttcttactgctttcctttggtttcctttgatgtcactggccccacccctgccgccggtcttctcatagtgcctcttgtgaggctgttggctgtgctgcagtcggtcctgcccgttgtctcggccctctgggactgcctgccttcagatgcacctttgttcacgggcctcaccgctcacgtcccagccgtcctgggggttctgctctgtgtcggaatgcccctgtacccagccctggcaccttcttagggtgggaggccttgctgttctgcatggagttgcaagagaggtcaggggcctccagcccagggcgtggatgagtgggctggcgtcctaaccatctgattgcttgcgaggttcttgcgtggtggggctttgctgctctggtcccggggatcttcctttggacccctgctctggactcctgatccagctccaggaggtgtccttagtgacttctcgaagctacagtgggcccatgggagatgtgcacttcagctgtctggcagagtgtattaaccagtgacttgtgtttgataacttatgtatccatgtgagttttgaatcacttaggacacattcttggtcctgtttgttcatctgagcgaagacaggtcctgtgcggggtccccacacctgtctctcgagcgcagcccccagtggcgcctgcaggctcaccactcaccaagggggccccaggtctagttttctgtctctcgggaggactgcctgcctgacgcctgataggtgctcagcaagtgcccttgggatggagcatgagtgccactgtctcttctgtgctgtgtgtgggcagcagatccaccatatggtgggcacctgactgggcaggcgggtgtgtgggggtgcacgctttctccaggatcagatggaagcccccaccgtttctggttcccccgacccggctccaggttccttgcagtcccttgtcctggtactgggttcacagaaatctcacttgtgcctggggctgggaggttctggtgaggcctgagcgtgccgcgcctcgcttccataccacctttccttcctgatcaaaggtggagcttatatttggaggggcgactccagctccctggaggtgcagtcctgcggtcctgcccatttgaaggtgggcgagtaacctgagcttgcagccactcgacaggatccttgactcctgctgcagacatgctcctggacctcagcgacctgctccaggtagacagcctccgtcctgcatctttccccacctggggttgtgacctgggggttgtgaccagggttgtgaccggggtgtaccccaggtgcctccacgcatctcagtggccggtctgtgctgcctgcccggtcaggaagttttggtctgtaggatgaggggccttcatgacatgggggtcacagtccgagacttgtgggagtgtgggtctccatggcaggagggcacctgccaatgctgggcacggttgggtgttagctaggcctgggtgaacagtgaacttttgtcctacacaaaggagattattttcaattaaaaaatttttttgtgagtacctagtttggtataggagattatttcttttgaccttgcattttatttatttatttatttatgagatggagtctcgctctgtcacccaggctggagtgcagtggcgtgatctcagcttactgcaacctctgcctcctgggctcaagcaatcctcccacctcagcctcccaagtagctgggaccacaggtgcccaccaccatgctcggctattttgtatttttagtagagacggggtcttgctatgttgcccaggctgctcttgaactcctgagctcaagcaaccctcccaccaaggcctccctaagtactggggtcacaggcatgaacaaccatacctggcctcttgcatgcattttaaattgtagaaaaatcttatattacagtctgtttggagacactcactttctgggtaccacagaaagcactttcagttacatctctctttccacatgactgaacaaagtgacagagtggaaagaccaaccccagggacccctgtgcagacaggatacagggtgggggcaccgaggctctgcagggaaggtgctgggggctgcaccacaggtccttggtgaccatgctgctgaggactcagaaatattgaaaacagttgtgaccacagtgcagaattcatgtagatttcactcctcaaagggagctctgtccagatccaggtgcccacaggggttctgggcacccacaggctgtgctgccacctctggtcctcaagggctttccgcctttggcagcagcccacagttaggcttctgcccgtgtcaggtggcatctggggtccttgtcctcccagctgtctttataaatggcaactcagaagctactgctgaaacattttgtggtcaagctaaaaatagtctgctggaattgtgataatccagcaagtccacatttcagatgctctgtgctcagtgcagggcaaaaccacatgaccctggttccaaccccacgacttcccagggaagatgagtatgagggccagggccagggcagctgctccggaagtggtcaggctcctggggactcagatggtcccatggcgagctcatggagtctccctcttgatccctgccttagggcagacccaggttgttcactggcctgggcacacagctcatcagacacccacgagggcagtctgcaggcagaatccacctgctgcccaggaagagagatggggggggcagctggctgtgccccaccctgacctgccctcaaggagcagccacagttagactgttagcaagagaatttccaataaatggtcctcatacatggtagcaactctgtaaagaactgcatgtatttaggccgggcgcggtggctcacacctgtaatccccgcactttgggaggctgaggcaggcagatcacctgaggtcaggagttcaagaccagcctggccaacatggtgaaaccccgtctctactaaaaatacaaaaattagctgagcgttgtggcggatgcctataatcccagctacttaggagggtgagacaggagaatcgcttgaacccttgaggtggaggttgcagtgagtcacgattgcgccattgcactccagcctgggcaacaagagtgaaactccgtctcaagaaaacaaacaaaaaactgcggccaggtgcggtggctcactcctgtaatcccagcactttgggaggccgaggcgggcagatcaggaggtctggagatcgagaccatcctggctaacgcggtgaaactccatctctactaaaaacacaaaaaaattagctgggcgtggtggtgggcgcctgtagtcctgactactcaggaggctgaggcaggagaatgacgtgaacccgggaggcagagcttgcagtgagcagagattgcaccactgcactccagcctgggcgacagagcaagactccgtctcaaaaacaaacaaactaaaacaaaaaaactgcacgcgttttgcacacatggctttttaaacgtgagtttccatgtaaaggccctttggagattcctcacttgcagtgttcaggtctcattgatccctgtgtctctgggacacaaggttggggggtgtggagtttgaggtgggcaggcagaggccagcagcagatcatggttctgctgtggcttaaagagagatggtgggatcaggacgatcaagatgcaggggcctggcaggaacccagcacaggggctggggcactcatacatgacatgcgtgagtcacacctagacacactgtatgcgtgtgtacacacatgcatgtctgcacactgcatgcggatgcacacacacactacatgtgctgacacgccccccagtttggtgagcagaccccagggatccctggaacccccagaaactgtgaggaggggaaattccttcagaaggcacagtctgtgagccaccagcccttgtgatggagccctcggatataatggagaagatggaagctgcgccccactggggtggatggtgaccaggaggagctgctgtgggggcccagccctcccagcgggcagggtccctgatcagaggcatcccccacaagcgctgcctctggctcttgcctctgtctcttgcctctagcgcagacaggaccctttgtgtgcggtcccttaggtctcccagtaccctggagtcagcaagcacctggaagtgccactggcgggccaggacaaggggacttgtctaagggcccacgagccgggcttggtcaggcgagggaattctttgggggaggctagtggcagagggtcagactggccaagcctgtgaggcccgggggccccaggggcaagcctgggatgaagacagccaagtgtgggcagggctcttgcaggctccagtagggaccaggctattcccgctgtgcacctcatccacacctgccagcagacattgctctgaagtgtcctcccccagccagcagggctccttaggggtactcggcccacggcagggctgtgcacagggtctgcacacaggctagagtccttgttttgctgaggacaagcagcggtgctcccatcactgccagccctcggcgttgcccttctcggtctgggcctcacctccactgccctatggcagatagccgaggcaggggtgacaggatctgtgtggatttggacctaaggtaggaacagtgtggggggcaggggagtcactgaggaacacagatctcagtcccagcaagggggctgaggccaagacccctgggtccatcggaatctgggctggaggtgtggctggtgggagcacatgtggacagaactggttttgtgttcatgggtgtgcagttgtgaatgaaatgctgcgtgcaccgtgtgatgacgccctgggagggaccttgcagtcaggttttcttctaagcagatgccatcattggcgagacggcagcacggcctaaagcagcggcttagaggaagaaggcagggccctgggagccccagcagccaagggaggccagccaggcttgcgggtgtggggtggctgctccacgggccatcggagtctttaaagactgcacaagagatgcattttaagagaaaaaaagcaaacatttccttaaataccaatgctgtttctggttgtgatctctccatctcaggtgaatgtgtacgtgcttggaaagacgtttcttctcttggcaagagagctctgcatcaatgcgccggccataggtaggcatctgggtgagatgctggggtgtccggcaggctgctgtagggaccagcgtgccaaatgtcctttgaacagtggagggaaatcctgtccaagcatgggacccctcaaggtaagaaatgtttcttaaagctgctaggagctcagtaatgtggggccttattttctaagacacagtctcgctgttgtccaggctggagtgcagtggcacaatcgtagctcactgcagcctcaaactcctggcctcaagtgatcctcgtgccttcgcctcccaaagcactgggattacaggcatgagaccgcacctggcctggggcttgctttctgctgcaaaaccagaaggcctgttgtcagtgcctgtcaggtggcaggaaggtgtagacagggaaacaagtgctgcgtgctgggagcatcttgtgtggacaaggtttaaggaacacacctggctccaggtgccactggacagatggggacagtggggcagctcctggttgtgctttccagccacagccctcttttgtggtttttctgccacttttgttctgtgttgtgtgcgagtttgtggaactcctgtatgcctttcttgatgtgtgttaggtgtagggtaagtcctgtctctccctcgaggcagcagcagtgttcatgcatgcagaatctaacctagcggaaaagtctagaaggaaaggatcaaaacagcactcactgcccgatggttctgacctaccctttctttaccaagcagatgactggtttccatggcccgcttagaggcccctttcttactttgcctgtttgcatctaggagcgtatgtcctttgggtagagaagcaccaggtggggctgggtcaccaacaggactgagcaacacgggctgcagcagcagaggggcaccggctgaggctatacactcggcccatgccctctcccaggtgccaagaggggccatccctcttttcgggggtcatacaggttttccagaaaacaactgcctacagggtatgcagagtgggaggagagagacaaggggtgggagagcctgtttcaccttatagtccactcctgcaacaggctgtcccgcagcagtgtcacagctagtgacagtccccagggtccagaacgctgggcccagcagaatgctcccccgacagtctgttcatagggtaggactctgaggtgctagtgatgcattaggacatagagacaaccaggcacctggtgtttcctagggtggcccagaagccagccagcaacccaggggacagatgggcttcactggggcgcagtttgctcctaaccacatagcatgttcagcatgacaggttttctcctcgggatgggagggagctgttctgttgcatgagaaagagaataccccactgtacaactgctgtagtgatttactgacacgtgggtgttattttaggcaacctttattacagaagtccactattttaagtgactttttgccaattttagatttgaagggaaggtctcaagttaagcttggaaccacttagaatccaagagggtagcaggaagatccaacccctcaaagcaggtggcgtgggtgccactgggaggggatctggggcctgtcttgagccgtaaatcttcctccacctgagacgtgcaccccactgtaccagagatgcctaagactccaatccctgggttctggctgtgtggaaaatgtctctacacagtcaagcttcagctgactacatgtcaaagagagacaaagttaagagcagcctttcatggtgtcaagaagcagttagcatcttgacttcccctccactcactcgctgacctgctgcagcctccccgggcacctcaggcatagaaaatgagctcagggatctgcccaccctggaccccagtcccgttggtgctgtccgaggagcactggaactggaaggccacctttccacactgcacttccgtcatcccctcctgcccaaagtagctgagttcgctgccgtccaggacggcactggccgtgtagaaggtgtcttgttcaacctggaccgggtgttcaaaccagaccgggaaggtgttactggatccgtctgacatgaacttggtcaagttctgagccagaaccaccccgagccgcttgagctcaatcttcacgctgtactcagccttcccagagctggagccatacaggcccagccctgcaataaatacccttctgtccactgcaaactggatgctgtcgcagcgcccgcggtaccgccactggttgctgcggtaggcagaagactggaatcggtggcacctctgcggggcgaggcccttcctcttggtcaggggaaagtccaggcggggcttgttggtggccgtgtaccacaggaagatgctgtgggtctcctccagagtcaggatgtctgactgggcagcgccgttggcaaactcctctagggtcatggttggaattcggaccagatagagggctcgccccagaacatgcctcttgtttcgtggggtgattggcagcccctgcctcttgcactccgcctcggcccagttcaggacggcctcgaagaccaccgcctctttggtgttgagggcctcccgagtgacaatgatctccagcgtctgccggtctatctcacagaagccttcggaccgtagggccatctcggcctgtgcgtcaatgacctcccagcagcgctgcgtcagctcgggctcctcaaacagccggctctgggacagcaggacgcaggcgttcttggcttccaaacttgtctccagaaagttgacacaggcttttgccaatgctgggacgatgtacttcttagcagcatacagagtggccagcaccgtgtcggcttccagatcgatctcatcactgtacatgtacctaggcgaggcagggcccgcgtcaggggctggctcccaagcacccatcgcggggctgggcctgggagaggagtccatcagctcctgtgtgcttcccttcagaagcctccggaggccgcctaaaacggacccacccgtccctccccagtagagtggacttactttaagaggatcagaaaggctgcgggctccacgtctggaatgtgaatttcagatttgacttccgccaggtctccgtagaacatggcatagaagacggagctgccgacagccaagacgtactgggaggagaaagcgccgccgtgagcctggctctcccgcaggctgcgtgtcagccacacggcggacggggcggacggggcacgcgttccgagaggggccgccgctacccaccttgtgggcgggcaccgtcctggtcgcccccgggggccccacgacgaagtgcacgtcggccatgagctcattgttgaacatgagcgcgttcctgcaaaggtagaggcacgggctgggggcgtgggcgcgcgcgggcgcgggggccgcggggcacgggctcacctctcgcgcagcgtggggcggcagcaccgccagccggggctctcctggtggttgttgccgagtgtgggcggcgcgggcgcgggcggcggcggcgcgggcgcgggggcgctgggcgggctgcgcggcccggccttcctgcccacggcggcgccggcgttgctgttggctaggtccgcggccgcggcgctggcgggagcgtagagttccgccgccatcttcgcgggcggggcggcgggggcagcctcggcgcctgtggacgccgcgccccgcgccctcgcgccgcgccggggcctcgggagcggctctgcaagcaaaagcaaggaggtcaggcactgagcgacgcggccgtgcaggcaggctaggggcagcagcatgggcggcggcggcgctgtgacccgcggggctgccacccgctcccctgccacccccgcccctgcgaccctgcccgagcccagcctagcgcagcccggccaggcccggccgcggggggcgccgtcccgcccgcccgcccgagcccgtacccgccgcggcgccggtgcgtcacgctgcgtcagggccgcgccccgcgcgacgtcgctgcctcgcggccccgcccccaggcccgacatcctcgaagctgctcgagcttctgcccagcaaccggcgcgagccgcgcgctgtgcagaggcagccgtggaaggcggctcccggcgctggcaggcggccgcccccagacccgcagtgccatgcgcaggtgcttgcgcccgttcttcagttagcgatcttttggttaggaacgcaggtggacctgcttgtttggccatttgcattccggagtctgcctctggccgcggcctgtgggatggtcgttgggcttcctcgttcgttcagatgcttcgcgatttagcttgctacggacgccagcagccagcgcttgcagagagcgcggtccactctgctctgagggctttacaggggcaggcgctgctatttcccggcattttcctcgaggaaataggcacagagaggttagtcgcgcgctgaaggtcacacagccggcgggtgggcaagtcaggatctggccctgggcctgcagccctggagcttgggccccagggcgcgccctgcctctgtggctctgcctgtggatcgcagtcgcaggctcgctccttgtggggcctctagcctcccggcctggggctaatcctgggaggtgcgtggcatggggcactggctttgctgatgaggagaccagacttcagaggccgtgtcacctggcctgggccgcacagctggtgcatgccaagctcgcgtgcagacgaagctccagaggcctggctgtcaggagggttcctccccgaggacacacacgcaacctcctggaccgccaggctttagacttttaaaacttccatatgcaggaaaccccacaggacgcagccagcatctcgggtcatgggtgcacccgtcaccgcagtcctgggctaaacagtgaacaggagctctgtgtctctgtggtcgttacagttgtagtgaatgttccctgggagagtcctcttcagaagatatttgcggtattttcaacaaaggactctccaggatggaggagcaactacaagtcaggaaggaaaaggctgacaacccagttttttaaaaaacgggcaaaggacgtgaacagacaccatgcaatggcccagagtgcacaaatcatcatttctcccaggaatggggtgcccgagcccccaggcggctgaacttgagacttgtcacgtagtgttggtggaatgcagagcagctggagatcacctgctgcaggtgggtgcgtaactccgcacggccaagccgtttggaaagctgtagcatatgcatgagagtccggaaagttccgagagaaagtgtgtggatgcacccgccaaggacacacccaccgaggccacagctgcgatttcatagtgtgggaccccactggcaaagacacgctggctgctgtagccgtggtttctgtcccagccgtctgtttccatagaaaaaggtaacgggcataagcagtttccaggagaaatacaaatggccagagtggagacagcctacatgtccatcagcaacagaaaggatcagcaggttgtggtgggtccatttggggaatgcagtgagaaggaataacttacagcagcacacaagacctgggcgacagctgtctccgggggtgccaggatagaactgctgagccgccagaggtagtcagcgtcttgatctgcatggtggtgtggagcatgtgaataataattttcatccttagaaagaagccaccctttgcactttgatttttaaatatgttacagtgtaggttgggcgcggtggctcacgcctgtaatcccagcactttgggaggccaaggtgggcggatcacttgaggtcaggagtttgagaccagcctggccaacatggtgaaaccccatctctactaaaaatacaaaaattaacgggcacctgtaatcccagctattcgggaggccaaggaaggagaatggctcgaaccagggaggcggaggttgcagtgagctgagatcatgctactgcacttcagcctggatgacagagcgagactccgttgaccaggctggtcttaaactcctggcctcaagtgatctacctgcctaggcctcccaaagtgctgggattacaggtgtgagccaccgcgcccaaactattcttttttgtttgtgataatggtcatcctaatggacatgaggtagtgtcatgtggttttgatttgcatgtccctgataaataatgatgttgaccatctactcatgtgcttgttggctatttgcatggcgtgtttggagaaacgtctgttcaagggctttgcctttttttttgagacagagtcttactccgttgcccaggctggagtgcggtggtgagggtgcactgcaacatccaccttccaggttcaagcgattcttgtgcctcagcctcccaaagagctgggattacaaaagtgcagtttgcccatttttaatcgattttgttcctgagttggagttttttgtatattcaggctgttaaccccttatgagatagatggtttgcacatagtctcttccattctataggatatcatttctgttaatagattcctttgctgtgcagaaactttttagtttgaggtcatcccatttgtctatttttactttcgttgcccttgctgttggtgtcatgttcaagaaatcattgccaagaccaatgtcgtgaagtctttccctttgttttcttctaagggttttacagtttcaagtctgtgtttgggtcttgcatcggttttgagttagtttttgtgtatgatgtaaggtaagggtctatctttatttgcaagtggatatccagttttcccagcgctgcatattgaagagaccatcctttccccattgtgcaagaagttcttgtcacccttgttgaaggtcatctgtctgtcattgtcatttctggccctgtgctgtcctgtcctgtcctgtcctgttctgttctgttggtctgtaggtctgtctttatgtcagcaccatactggctgttggactttttaattcttttcttgacagtggtaatttatttgcttctttttcttattagtccctttgcctactttaaataattaattttgttaatttttagttttctgttattttagttcattaatttcattgcttcctttatttatttatttattttttttgagatggagtcttgctctgtcactcaggctggagtgcagtggcacgatctcagctcactgcaacctccacctcccaggttcaagtgattctcctgtctcagtctcctgagtagctgggattacaggcacgtgccaccatgcccggctaattttttgtattttttagtagagacggggtttcgctgtgttgcccgggctggtttcaaacttctgagctcaggcaatccacctgcctcggcctcccaaagtgctaggattacaggtgtgagccaccacgcctgacccattgctgccttaaatacacaaagcgcttgagttaataaagttacctgaaggattgaactttaatttctaacagcgtttggaggtgaggggactacttgtttttgctcatttttagtttttttttttttgcacttggggtcaaatggcatgtcctatgtgctgttacctgaaatatattgagggtttctttgttctatcatacctggtcattttcataactgtcccacagacactggagaagcatgatgactccatggggtacagaatttagaacatccttgtcagattgagtctatggtgatgtgtcttaagtcgtcccttagtcttttttttcctaatcagtctgtcaaatttcagagaaccatgttaaaatcccctattattgtggttttgaaggttgtttccagtgtttttccttcatttaattcttcctctgtcgctgtgcgcctgcagattccaggctgcttgacatgggttcctttccatgatgaaatgccatgcctgtcccgtgctgctctgccactccgcgtttgcccaccgtgccgctgctgcccaccacctcctcctcctccaccctagtcactgacagatttgtcttgaaaaaaacactttttgcttgtcttttttgttttttgttttgagacatggtgtcagtcacctaggctagaatgcagtggcaaggtcatggctcaatgcagccccgacctcctggactcaagcaatcctcccacctcagcctcccaagtagctgagacaacaggtatgcatcactacactaggctaaatttttcattttttgtaaagatgggggtctctctatattgcctaggctggtttcaaactcctgggctcaagcgatcctcctgccttggcctcccaaagttctgggactcacaggtgtgagccactgcatccggccccagattttttttttaagagatggggtcttgctgtgtttcccaggctgacctcgaactcccgggctcaagcaatcctcccacctcggccttccaagtagctaggaatgtaggtatgagccactctgcctggcttgtcttgaattttttgtttgtttgtttgagatggagtctcgctctgtcgcctaggctggagtacagtggcgcagtcttggttcattgcaacctccacctcccgggttcaagcaaattctcctgttgcagcctccttagtacctgggatgactacaggcgcacaccaccacccccagctaatttttgtatctttagtagagatggggtttcactatattggccaggctggtcttgaattcctgacgtcaggtgatccaccctcctcggcctcccaaagtgctgggattacaggtgtgagccactgtgcccagccgttgatatatttaccagtgtttttgaaatgagttttctatttcaataattaatgagcatcaaagtctcacccacattagtacatctttttctttctctctctttttttttttctgttgcccaggcctgagtacagtggtgcaatcacagctcactgcagcctcaacctcccgggctcaagtgatcctactgcctcagcctcctcagtagctgggactagaccacacccactaatttttttttttttttttaagagacagagtcttgctgctctgtcgcccaggctggagtgcagtggcatgatcttggctcactataacctcccacctcccagcttcaagcaatgctgtagtctcagcctttcaagtatctgggactataggtgcccgccaccacacccggctaattttttttttttttttttgtattttagtagagacagggtttcactatgttgtccagggtggtctcgaactcctaagctcaggcaatccacctgccttggcctcccaaaattctgggattacagatgtgagccaccacacccagcctcacacccactaatttttttgtttgtttgtttgtttgttttttgagacagagtctcactctgtcatccaggctggagtgcagtggcatgatcttggctcactgcaatctccgcctcctaggttcaagcgattctcctgcctcagcctcccaagtaggtgggattacaggcgtgcaccaccacgcccagctcattttttgtattttagttgagacggggtttcaccatgttgcccagggtggtctcgatctcctgagctcaggtcatccacccgccctaatctcccaaagtgttgggattacaggcgtaagccgcagcacctggccccggccaaatttttttcaaaaacttttgtatagacttcgtctctgtattgcccagtctataagcatatctttttttttttttttttttttttttgagtcagaacttcgctcttgttgcccaggctggagtgcaatgctgcgatctcagctcaccaaaacctccacctccctggttcaagcaattctccagcctcagcctcttgagtagctgggactagaggcatgcaccaccacgccctgcaaattttgtatttttagtaaagatggggtttctccatgttggtcaggccggtctcgaactgcggacctcaggtgatccgcccgcctcggcccccaaagtgctgggattagaggtgtgagccaccgcgcccagcctatgagcatattttttatcgttctctttatttctagctgcgatgattgtatcttattgaaaatcattaaaaatcttagcaattgttttaaattatctaatttttttctccaaataatatctattttagcagccaaatcaccacaaatcattggtttttatctttagttgtgggtgcacagcgggtgcgtgtattttggggcatgtgaggtgtcttgatgcgttcatgcagtgtgtaacagtcacatcagggtaaatgggacatctttcacctcaagcatttatccttcgtgttatggacaccctcagctggaaagggggaccgcgtcgtgagtatgaatggatgcaagtcatagccacctgagcctggtggggcacagcagggccctgtggagtcacatcccggcctcatgctcggcataggggagcgctgcttaggtccatgcagtcactcagggcccaggctgcgcagcgcccagcctgtcctgctccaggcactcccccatggcactgtgccgtgctggcagaggtgcacagcgccaggcctcagtgtgcacacacagcccccgtggcaccgccatgctggtagagatgccagaagtgggccctcctctcacccatgagtgtcagctgatgccggccggctggcgacttgtgtacccagcccacgcctgtcttgctctaagagtccccggaccgttgttgcgtgtggtgctgtctgcatggtctggagggaaggctgctgggtgtgcgcccctctgtgtcctgagcagggcggccatgcagtaggagcacgctgcctggccctagcgtgtctgcagcaggctggctggcagcaggtggccagtggctctcctgggttcggtgcgatggctgccctagctgagggtcagagaggctttgtccaggggaggggaactggtggggggcctgggggcctggaaagacaagtgcaggttgccccacccctgggctgcgtgggccgcctgtgcacgtgccatggcacatggaggtgggcactgaggtgctgtgtctgccgcagacccgtgcctgtatattccacgctttgcgcacctgctggaattcggggagaagaaccacgaggtgtccatgactgccctgaggctcctacagaggatgaagcgggactggatgcacacaggccggcgcccctcgggcctctgcggagcaggtacagcgggccctgcctgcctgggggatgctggtctgggtcctggcctcacactttcctgactcctgagtgctggtgggctgggccgtatgtttgcagagcactgagagctgcctccagcctcccggggctgactctggcctggcccaccggggtcctcagccctccaggacctcctggctgccccgttggcctctgcgtgtcctggcataaggggcagaactctcagggcagagcggccttgaccccaggttgcctacttctggggtgcggctgcatgggcatccctgcccgtggtctcgtggggcccggcttctgacgcggacagtggtgtggcctctctctcctgagatgctaggttgttgctcctgagggtgccacagggctgtcaggctgtcccccgcccccagctgggcgactacgcggacagtggtgtggcctctctctcctgagatgctaggttgttgctcctgagggtgccacagggctgccaggctgtcccccgcccccagctgggcgactacgcggacagtggtgtggcctctctctcctgagatgctaggttgttgctcctgagggtgccacagggctgccaggctgtcccccgcccccagctgggcgactacgcggacagtggtgtggcctctctctcctgagatgctaggttgttgctcctgagggtgccacggggctgtcaggctgtcccccgcccccagctgggcgactacgcggacagtggtgtggcctctctctcctgagatgctaggttgttgctcctgagggtgccacggggctgccaggctgtcccccgcccccagctgggcgactacgcggacagtggtgtggcctctctctcctgagatgctaggttgttgctcctgagggtgccacagggctgtcaggctgtcccccgcccccagctgggcgactacgcggacagtggtgtggcctctctctcctgagatgctaggttgttgctcctgagggtgccacggggctgccaggctgtcccccgcccccagctgggcgactacgcggacagtggtgtggcctctctctcctgagatgctaggttgttgctcctgagggtgccacggggctgccaggctgtcccccgcccccagctgggcgactacgcggacagtggtgtggcctctctctcctgagatgctaggttgttgctcctgagggtgccacggggctgccaggctgtcccccgcccccagctgggcgactacgcggacagtggtgtggcctctctctcctgagatgctaggttgttgctcctgagggtgccacggggctgtcaggctgtcccccgcccccagctgggcgactacgcggacagtggtgtggcctctctctcctgagatgctaggttgttgctcctgagggtgccacggggctgccaggctgtcccccgcccccagctgggcgactacgcggacagtggtgtggcctctctctcctgagatgctaggttgttgctcctgagggtgccacggggctgccaggctgtcccccgcccccagctgggcgactacgcggacagtggtgtggcctctctctcctgagatgctaggttgttgctcctgagggtgccacagggctgccaggctgtcccccgcccccagctgggcgactacgcggacagtggtgtggcctctctctcctgagatgctaggttgttgctcctgagggtgccacagggctgtcaggctgtcccccgcccccagctgggcgactacgcggacagtggtgtggcctctctctcctgagatgctaggttgttgctcctgagggtgccacagggctgccaggctgtcccccgcccccagctgggcgactacgcggacagtggtgtggcctctctctcctgagatgctaggttgttgctcctgagggtgccacagggctgccaggctgtcccccgcccccagctgggcgactacgcggacagtggtgtggcctctctctcctgagatgctaggttgttgctcctgagggtgccacagggctgccaggctgtcccccgcccccagctgggcgactacgcggacagtggtgtggcctctctctcctgagatgctaggttgttgctcctgagggtgccacggggctgccaggctgtcccccgcccccagctgggcgactacgcggacagtggtgtggcctctctctcctgagatgctaggttgttgctcctgagggtgccacagggctgccaggctgtcccccgcccccagctgggcgactacgcggacagtggtgtggcctctctctcctgagatgctaggttgttgctcctgagggtgccacggggctgtcaggctgtcccccgcccccagctgggcgactacgcggacagtggtgtggcctctctctcctgagatgctaggttgttgctcctgagggtgccacggggctgtcaggctgtcccccgcccccagctgggcgactacgcggacagtggtgtggcctctctctcctgagatgctaggttgttgctcctgagggtgccacggggctgccaggctgtcccccgcccccagctgggcgactacacggacagtggtgtggcctctctctcctgagatgctaggttgttgctcctgagggtgccacggggctgtcaggctgtcccccgcccccagctgggcgactacgcggacagtggtgtggcctctctctcctgagatgctaggttgttgctcctgagggtgccacggggctgtcaggctgtcccccgcccccagctgggcgactacgcggacagtggtgtggcctctctctcctgagatgctaggttgttgctcctgagggtgccacggggctgccaggctgtcccccgcccccagctgggcgactacgcggacagtggtgtggcctctctctcctgagatgctaggttgttgctcctgagggtgccacggggctgccaggctgtcccccgcccccagctgggcgactacgcggacagtggtgtggcctctctctcctgagatgctaggttgttgctcctgagggtgccacggggctgccaggctgtcccccgcccccagctgggcgactacgcggacagtggtgtggcctctctctcctgagatgctaggttgttgctcctgagggtgccacggggctgccaggctgtcccccgcccccagctgggcgactacgcggacagtggtgtggcctctctctcctgagatgctaggttgttgctcctgagggtgccacggggctgccaggctgtcccccgcccccagctgggcgactacgcggacagtggtgtggcctctctctcctgagatgctaggttgttgctcctgagggtgccacggggctgtcaggctgtcccccgcccccagctgggcgactacgcggacagtggtgtggcctctctctcctgagatgctaggttgttgctcctgagggtgccacggggctgccaggctgtcccccgcccccagctgggcgactacgcggatagtggtgtggcctctctctcctgagatgctaggttgttgctcctgagggtgccacagggctgccaggctgtcccccgcccccagctgggcgactacgcggatagtggtgtggcctctctctcctgagatgctaggttgttgctcctgagggtgccacggggctgccaggctgtcccccgcccccagctgggcgactacgcggacagtggtgtggcctctctctcctgagatgctaggttgttgctcctgagggtgccacggggctgccaggctgtcccccgcccccagctgggcgactacgcggacagtggtgtggcctctctctcctgagatgctaggttgttgctcctgagggtgccacggggctgccaggctgtcccccgcccccagctgggcgactacgcggacagtggtgtggcctctctctcctgagatgctaggttgttgctcctgagggtgccacagggctgccaggctgtcccccgcccccagctgggcgactacgcggacagtggtgtggcctctctctcctgagatgctaggttgttgctcctgagggtgccacggggctgccaggctgtcccccgcccccagctgggcgactacgcggacagtggtgtggcctctctctcctgagatgctaggttgttgctcctgagggtgccacggggctgccaggctgtcccccgcccccagctgggcgactacgcggacagtggtgtggcctctctctcctgagatgctaggttgttgctcctgagggtgccacagggctgccaggctgtcccccgcccccagctgggcgactacgcggacagtggtgtggcctctctctcctgagatgctaggttgttgctcctgagggtgccacggggctgccaggctgtcccccgcccccagctgggcgactacgcggacagtggtgtggcctctctctcctgagatgctaggttgttgctcctgagggtgccacggggctgccaggctgtcccccgcccccagctgggcgactacgcggacagtggtgtggcctctctctcctgagatgctaggttgttgctcctgagggtgccacagggctgccaggctgtcccccgcccccagctgggcgactacgcggacagtggtgtggcctctctctcctgagatgctaggttgttgctcctgagggtgccacggggctgccaggctgtcccccgcccccagctgggcgactacgcggacagtggtgtggcctctctctcctgagatgctaggttgttgctcctgagggtgccacagggctgtcaggctgtcccccgcccccagctgggcgactacgcggacagtggtgtggcctctctctcctgagatgctaggttgttgctcctgagggtgccacggggctgccaggctgtcccccgcccccagctgggcgactacgcggacagtggtgtggcctctctctcctgagatgctaggttgttgctcctgagggtgccacggggctgtcaggctgtcccccgcccccagctgggcgactacgcggacagtggtgtggcctctctctcctgagatgctaggttgttgctcctgagggtgccacggggctgtcaggctgtcccccgcccccagctgggcgactacgcggacagtggtgtggcctctctctcctgagatgctaggttgttgctcctgagggtgccacggggctgtcaggctgtcccccgcccccagctgggcgactacgcggacagtggtgtggcctctctctcctgagatgctaggttgttgctcctgagggtgccacggggctgccaggctgtcccccgcccccagctgggcgactacgcggacagtggtgtggcctctctctcctgagatgctaggttgttgctcctgagggtgccacggggctgtcaggctgtcccccgcccccagctgggcgactacgcggacagtggtgtggcctctctctcctgagatgctaggttgttgctcctgagggtgccacggggctgccaggctgtcccccgcccccagctgggcgactacgcggacagtggtgtggcctctctctcctgagatgctaggttgttgctcctgagggtgccacggggctgccaggctgtcccccgcccccagctgggcgactacgcggacagtggtgtggcctctctctcctgagatgctaggttgttgctcctgagggtgccacggggctgccaggctgtcccccgcccccagctgggcgactacgcggacagtggtgtggcctctctctcctgagatgctaggttgttgctcctgagggtgccacggggctgccaggctgtcccccgcccccagctgggcgactacgcggacagtggtgtggcctctctctcctgagatgctaggttgttgctcctgagggtgccacggggctgccaggctgtcccccgcccccagctgggcgactacgcggacagtggtgtggcctctctctcctgagatgctaggttgttgctcctgagggtgccacggggctgccaggctgtcccccgcccccagctgggcgactacgcggacagtggtgtggcctctctctcctgagatgctaggttgttgctcctgagggtgccacggggctgccaggctgtcccccgcccccagctgggcgactacgcggacagtggtgtggcctctctctcctgagatgctaggttgttgctcctgagggtgccacggggctgccaggctgtcccccgcccccagctgggcgactacgcggacagtggtgtggcctctctctcctgagatgctaggttgttgctcctgagggtgccacggggctgccaggctgtcccccgcccccagctgggcgactacgcggacagtggtgtggcctctctctcctgagatgctaggttgttgctcctgagggtgccacggggctgccaggctgtcccccgcccccagctgggcgactacgcggacagtggtgtggcctctctctcctgagatgctaggttgttgctcctgagggtgccacggggctgccaggctgtcccccgcccccagctgggcgactacgcggacagtggtgtggcctctctctcctgagatgctaggttgttgctcctgagggtgccacggggctgccaggctgtcccccgcccccagctgggcgactacgcggacagtggtgtggcctctctctcctgagatgctaggttgttgctcctgagggtgccacggggctgccaggctgtcccccgcccccagctgggcgactacgcggacagtggtgtggcctctctctcctgagatgctaggttgttgctcctgagggtgccacggggctgccaggctgtcccccgcccccagctgggcgactacgcggacagtggtgtggcctctctctcctgagatgctaggttgttgctcctgagggtgccacggggctgccaggctgtcccccgcccccagctgggcgactacgcggacagtggtgtggcctctctctcctgagatgctaggttgttgctcctgagggtgccacggggctgccaggctgtcccccgcccccagctgggcgactacgcggacagtggtgtggcctctctctcctgagatgctaggttgttgctcctgagggtgccacggggctgccaggctgtcccccgcccccagctgggcgactacgcggacagtggtgtggcctctctctcctgagatgctaggttgttgctcctgagggtgccacggggctgtcaggctgtcccccgcccccagctgggcgactacgcggacagtggtgtggcctctctctcctgagatgctaggttgttgctcctgagggtgccacggggctgccaggctgtcccccgcccccagctgggcgactacgcggacagtggtgtggcctctctctcctgagatgctaggttgttgctcctgagggtgccacggggctgccaggctgtcccccgcccccagctgggcgactacgcggacagtggtgtggcctctctctcctgagatgctaggttgttgctcctgagggtgccacggggctgccaggctgtcccccgcccccagctgggcgactacgcggacagtggtgtggcctctctctcctgagatgctaggttgttgctcctgagggtgccacagggctgccaggctgtcccccgcccccagctgggcgactacgcggacagtggtgtggcctctctctcctgagatgctaggttgttgctcctgagggtgccacggggctgccaggctgtcccccgcccccagctgggcgactacgcggacagtggtgtggcctctctctcctgagatgctaggttgttgctcctgagggtgccacggggctgccaggctgtcccccgcccccagctgggcgactacgcggacagtggtgtggcctctctctcctgagatgctaggttgttgctcctgagggtgccacggggctgccaggctgtcccccgcccccagctgggcgactacgcggacagtggtgtggcctctctctcctgagatgctaggttgttgctcctgagggtgccacggggctgccaggctgtcccccgcccccagctgggcgactacgcggacagtggtgtggcctctctctcctgagatgctaggttgttgctcctgagggtgccacggggctgccaggctgtcccccgcccccagctgggcgactacgcggacagtggtgtggcctctctctcctgagatgctaggttgttgctcctgagggtgccacggggctgccaggctgtcccccgcccccagctgggcgactgttctagttggacctctgtgaccccccaggtcgcagctgtcactcagactctcactttgcccttggtgctggtgggtggatgtggccgtggcctggtcaactaccccaactccggaattggagccccaggtcggcagggccctcactcctcatccgggcccttaccctcgtgcccacagagtccactctacccggcaggccaggtaccggcatccctgcgctgcaggattcagtccacctgagaagccgttccatctgcacacatgatctccatgtttgcactggaggttctgggcccactgtggccttggtgaacctgtgtcagctgccagctgtggcctcgcccctttcctgcccagcctggctccgcatcctcagagtccccagctcccatcacaagctgtgtttcccgcacagtcatcttagagttagtttgtttgctttgagggattacgtgaagctctcggaagccttcattttaattttccttgatttgaaaatggaatgggtgcagccgccacccacaataagatagagagggtcatgtcgttcaggagtagccatgccaagtgagggtctcactgcctggcacagacacgtcttctcaggccatcatctccgtgaccgggatccgcagtgttgtcctgggccgccacagatgttgccctggttcccagccgtggttgacgaggcccgtctcgttgccttccagcgctcctggttgcagccagaatgcatgacttcaggaggactgtgaaggaggtcatcagtgtggtcaaagtgtgtgagtccacgctgcggaagaggtgaggggctctcattcatggcatggggaccacacagaggcttcatcagtccagctcaggcctgcttgccagagcaggcgccacctcccgggaccctgccgtcccccgcctggctgctggccaggacctagcccagccccggtcacactatggcttggacgtgctggtgggctgcctcgcctccctccagagagttccctgctagtccttctggggccggccctatcctgcggaggcatcctcctcctccgatccctgtattttttttttttttttgaggaacagccttgctctgtcgcttaggctggagtgcaatagcgtgatctcggctcactgtaacctctgcctcccgggtccaagagattctcctgcctcagcctcctgagtagctgggattacaggcgtgtgccaccacgcctggctaattttttagtagagatggggtctcaccatgttggtcatgctggtcttgaactcctgacctcgtgatctgcccgtcttggcctcccaaagtgctgggattacaggcatgagccaccgcgccccgtgtttctaagttgaggcggagggtgatgtgtaaagttgccctaagtcacaaacaggcatgaggctgtctttgacgtcagaagcctggtccgtctcctttttgctgtggcccgtcctggactttgagagcccaggtgacccctgtcccagtgagaagccggagtgccataagaggtccccgcatcagtgaaatgagtggcgtagcaagccaggcaggcaggggtggggctttgcaccccggctttgctgggtggtatttgtcggggttcctcacagctcgcctgcaccgcagccctgtttcatagactttgacaaggtaaatgtgacagtggagttgctgccacctgtaactgctgtgacatttatcacaaatcttaaacacaggactgctgtttttcagctgagattgtgtcctgtggcattttccaaaaccagctgtaaagtatttcactttaaacatctgaccattgattctgtaaaaaaaatctttgatgaaacgtgtttgaaggttgtgtagcgtgtagaggcgttcgtaagaactgagccccatggctcacaggcctgcagggccccttcctgcccgactgccaggtgctgaggttctagcccagcctcctctcttcaggccttctgagtcttccgcctaggattggggttctcttgtgagggatgagggtgcctgtgggcctttctcctagtgagcagaggtccgggcaggatcgggtaggggtggagaagccgccagaagggacctgggcgccgaggggcaaggcctgagtgccaggccccgtggaggaacatccgacaagcacagttcaggtatttgtttttattgttatttattcatttttttgacacagattttcgctcttgccgcccaggctggagtacagtggcacgatcttggctcactgcaagctccgcctcctggattcaagcgattctccggcctcagcctcccgagtagccgagattacaggctcccaccaccatgcccagctaatttttgttatttttaatagagatggggtttcaccgtgttggcctggctggtctcaaactcctgacctcaggtgatcctaccacttcggcctcccacatgctgggattacaggcatgagccacagcacctggccttttattttttatgtattttttgagacaaaatctcactctgctgcccaggctggaggccagtggcgctatcacagctcgttacagcctcaacctcctgggctcaagcgattctccctgacctcagcctcccaagtagcagaaactacaggtgtgtaccaccatgcgtggctaatttttttttttttttttgggtagagacagagtctcactgtgttgcctaggctggtctcaaagtcttggactcaagcaatccacccaccttgggctcccaaagcactgggatcacaggcatgagccacgcccaggcgaaagctcagttttaaacagctggtttcagagccaccagctccatttcccatgtctggctccattttaggctcacggaatttgaagacacccccaccagtcagttgaccattgatgagttcatgaagatcgacctggaggaggagtgcgaccccccctcgtacacagctgggcagaggaagctgcggatgaagcaggtagcgccggctttggtgtctgtctgtgctgggcttgccagccttggggggaagccacacaccccgactggggttgtagcagagctggtgccatcccaaagcctcatagccgctcttcagtgctatgaccagccagagcccgaggctccgggatgcccctcacacagactctgggaagtgccacctcttcccatgggggacacaggcccatagctccacctccatcgctgcgtacccctaagttctagcagcctgtggtccctggggcccacgcggcaccccagaggctgcgctgtgcaccagggcctcccttcacgaagcctcttgccctgttccctttcagcttgaacaagtcctgtcaaaaaaactggaggaggttgaaggtaaccaaccaatcttcccatgtaatgcttctgttttgttgggaaaattgattttatgctgactttttgcttttaacttatgacttcaggtgaaatatccagttaccaggatgcaattgagattgaactagaaaacagccggccaaaggccaaggggggcctggccagcctggcaaaagatggtgagtccactgtgcccggcccctattcagacctttaaaatgtgctagagtctcagcagatctcttcaggatcagaaaaagacctggaaagggaaggggattatctacagaatgtaagtttaccaccgggcagggtggctcacgcctgtaatcccagcactttaggaggctgaggcaggcggatcacgaggtcaggagatggagaccatcctggccaacatggtgaaaccctgtctctactacaaatgcaaaaattagctgggcgtggtggtgcgcacctgtagtcccagctccatgggaggctgaggcaggataatcatttgaacctgggaagtggaggtagcagtgagccaagatcgcaccacggcactccagcctgggtgacagagcgagactccgtctcaaacaaaaaaaaaaagaatgtaagtttcccctacaaaagacagctttgcggggccatttcaaaatatgtcaaagatattttggggtaaaatatttttatttctttcagggcctgctacctgtcattgatgttgtactagagtcaggttggaatttggtatctgttgctacaaagtctggtcaatcatcagatctgtgttttgatgttaatgctgatgagctgtgcctgaactccaaagggagggggtataagcgggtataatgaggcgtgtctgaccccgcccccacttcccatcatggtctgaactagcttttcaggtttctttgaaatctccttggccaagagaagggatccatttggttggttgtggggcttagaatcttgtttttgatttgtattctgtactgtgtattttcacttgggggttagtaggagccacgggagggcctgagaacagaggcaggaggtagggaggctgttgcaggaacccagggtgagagacctggcccagcctggtcgaactctggaggtacttttggggcagagccaacagtccagggaatgtgcatgtcccgggaatgtggcagccggagcccccaaggctcctggcacctgcggcctgggcccacttgcccggggaggggcttctgagaggctgctctgtccagaggtcatcgtccactgacagctgctctctggggatcaggtgctttcccccaaggagccattcctcaccatggggacccctccgggactcagtgctagccaggaatcttgtattggaacacattcagaagaaagcagtctaagactagggagtgggtcaagcatggtggttcatgcctgtaatcgcagcactttgggaggcaaatacaggaggactgcttgagcagagttcaagaccagcctggtcagcatagtgagaccccatctctacaaaaaataaaaaaattagctgggcatgggagtgtgcacctgtagtcccagctcctcgggaggctgaggccggaggatcacttgaacccaggagttcgatgtgcagtgagctatgattgcaccactgtattccagcctgggcagcagagccagaccctgtccccagtatacacacacacaaaatccagagtgggatgttttaagatgagttttgccaaccttaaaggaagaagcagaggcaaaagtaatctacataatttatttgggtcaagcttgaggattgcagccagggtggacatatcccattgccttgaatatacactctggtgagcagcagttacacatggactttttctttttttggagacaggctcactctgtcacccaggctggagtgcagttgcataatctcagctcaccacaacctctaccctgtagtttgaagcaattctcctgcctcaccctcctgagtagttgggactacaggcatgcgccaccacgcccagctaatttttgtattttttgtagaaacggggtttcgccacgttggccaggctgatctcgaactcctgacctcaagtgatctgtccaccttggcccgccaaagtgcgggattacaggagtgagccagcctcagctacagatggatttttaaaggcaaaaagggacagtgattggatagatacaaagttgtctgttgggaattctcattggcttacaatagtaacgttcattcgtgattggctgtacatcgttaaactattgggtgcggcattattgggttagtttagagctacttgtggcaacagcaagtggtttcaagaaatgaacacgtagctcaaggaggaggagtcacattcctcccgtgaaagttcttttctcagtcttttaaatttaccattgggtgatttttaacagccttattgaggtgtgattgccgtatgaaaactgctcatatttaaaatgtgccctttgatttctgaactttgatgtctgcacacacctgtgaagccatagtgacaaccaagaagacccacagatctgtggctcccacggggtccacaggcccttggtcaccaccccccctcctgccccaggccaccagtgagctacttttttcacgataaattagttgtattctgtagaattccgtaggagtaggatcacatagtatatgtttttcccttcggcttttttcacagtgtaattatgttgagtcacgcatcaatggtttgctcatttgtgttgtggcgtggcagtcggtagtccttcagcacgctgagggtgtgtgttgagtcacgcatcaatggtttgttcgtttgtattgtgtggcagtcggtagtccttcagcacgctgagggtgtgtagccattcatctgttagaggacattgcacgtttgaggctgtttcagatgcgctcgtgaacactcgtgtacaagtccttgtgtggacgttgatttccttttgggtcaattgctgaggagtgaaattgctgggttatgtgaaaggcaagtgtgtatgtctttttttgttgtttttgagacggtcttactctgtcacccagagtggagtgcaatagttccatcatagctcactgcagtgtcaacctcctgggctcaagcaaccctcccatctcagcctcccaagtagctgggactgcaggcgggcaccaccacacccagataatttttacatttcttcatagagacaggatcttgctgtgttgcccaggctggtctggaactcctgagcccaagtgggcggccacgaactgcctgtctttaagaaatgatcaggttgtcagccaggcgcagagcctcacgcctgtaatcccagcactttgggaggctgaggtgggcagatcacaaggtcaggagatcaagaccatcctggctaacacagtgaaaccccgtctcttctaaaaatacaaaaaattagccgggtgtggtggcgggcgcctgtagtcccagctactcaggaggctgaggcaggagaatggcgtgaacccgggaggcggagcttgcagtgagccgagatcgcgtcactgcactccagcctgggcgacagagcgagactccgtctcaaaaaaaaaaaaagaactgatcaggttgtctccaaagggttagcaccatgcgtggaagtgcaagggagcgtgttccccctgtctgggaagtgcggcctggttttcttttcagggctagacattctgatggttgtgaaggaggagcttggggtggtttcatttgcatttccttcaggactggaggtctttgtatatgttcatttacaccaatatgtcgtcttcgccggagtgttcagatctttttccattttttaattgggttgtgttttcttgtgaagttttgggaattcttcatctgttctagatttaagtcctttatcagttacgagatttgcagataagcctgtgggctgtcttcattgtcttaacgatgtctttcaaagggcagttcttaattttttggaaatccgttttatcagtgttttatggattctgcttttagaaccattagaaatgtttgccttatccaaggtcacaaagtttttcttttacgtttttgtctgaaatgtctgtactttaactctccccctaggtctgtgatctgctttgagctaacttccgcgtgcagtgcgaggtgtgggctgaggctcgttctttggcacctgaccgccaggcaccgtgcactgacagccgttctatgggttacctggcagcttggtagcattgttttttgtcacaaaagcgggcaccctggccctctgcctggttaacaggtggattgtgtacacctaggctccaccgaggacaccgcgtccagcttgtgtggcgaggaggacacagaggacgaggagctggaagccgcggccagccacctgaacaaagacttataccgggagctccttggtggtgcccccggcagctcggaagcagcaggaagccccgagtggggcggcagacctccggccctggggtccctgctggaccccctccccactgcagccagcctgggcatctcagactccatccgcgaatgcatctcctctcagagcagcgaccccagtgagttctgatggggccctgggggacgctgaggtcatcgggagatctttcaggcgtgtgcctctcatggggagagccggatgctgccatcctctgtcgggaggtgtggtggtctcgggcggtgggcttgggtggtggcaccaccagtccccccaatggggctgtgtgggcgtcagtggtcctggcgtgaagaattgggtgtgtgccgacgccagaatgcagtgagtctcgtcaccctcactgggaccgccttcaggtcacaggggccacggagaatggagcccacaagttgtgtccaggagtcccatggggcagctccacccctcatccgcttgtccaacatggtcgggggaacgtcacttgctgagcttgggcgtggcaatgacgaggcacccctgccccatagtgcccaggccaggccaccgtgcccatcttgccccccctcaccttgcccatttggctgggagctctaggagaaaggtgggtcccatcccccatccctgccaggacaggcttccctggctgagagcctagaccttcctgcaacgcttcaccctcaagccctgcctcccgtcgggcaccagggcctggcctctgtgtgaggagccaggcgaatgtttatcaagtgatatctgggccggggtagagacaatcctgatggttggggctgctgtgtgggtggaacccaggcgagtcacacagagcaacaggcagaggggacatgcacaggccctggggcagccagcggcacagtgaccctgagcagaaagggccattctggctggagctgaggaagggctgcctgtgagtgctgagaggagccgtctctggcctcggccctggagcagcatggcaggagagcacctcagacagtctggccctgtgctggagttgacttggcagcacggggcaggcagctatggcgtggggctgtggcaaggagaggctgtcccaattccaggctgtgcagatgctgcctggactgcgtggggctgggcaggggtgacaggcaggttttggggtgtcctgagcatgatcatggagggctccctcaggcctggactccggaatcatttctattccctcatttctatccccagacctatgggctcagtgatggggagctggctcccctgagcacagacccccatctcactccgtggcctgacctttccttcctgcccagcttccgtgccctccctcggtctttggggcctgacagcctctgtctcctgttcttaaaaagttgcttttttacaaaaagcacagaagtgctggggttttcctttgcagcttcagttcagtgttctgctggcttcgcttagtgtcctgagctaggcatttaaagaggtgcggtcatgtgggcagacagggcgcgacccaccagtgcagaggaggggacggggttctagaaagcccttagcccagacccagggtcctgagccagcccaggtggtggccacgctcctataatcagtgctggccctgagtgacgcggatgctgtgcttccctccagaagatgcttcaggagacggtgagctggacctcagtggcattgatgacctggagattgacagggtacgtggcagcaccccttcccaagaggggctgggcttgggagggcgctgcagcccaaggagccctgagtggtcgggcggggttggccacctcccctgcccagagcccaccccgctgggtgaagtgggctcctggccttctggccactgttcccgggacccccccccacactctcttctccagtgtcggctcgggggcggcctgtcgagaggcccctggctttgcgcctggtccttgcggccctcggcacatagcctgcagcaggcacacatcgcacaaatagcaccaggggcagcccctcgaggggtctctagacacaagagggcacccactgactccacatgcgctgtgcgcccccaaaccccagggcttccagccattgggaccagctctttgcagtttatctcaatatacttgccctctgtcaggcaggaagtcgtcttccctgatttcatggccacgtggtgcctcagacccctccagcctggcccatctgtacctgagtgggaggctctcaccctcacttggcccctttgtgggaacctgtggcctgcactctggctggccagggtcctggtgccggcagggcttgcaagctgccctagggggtctcacacatgtggcctgcgtggttggccttgggacaggccacagagcaacaggtccccaactcgccccgcgcgatgaggcctcagcccaggctccgcactaaatagaggctgccccgggttccccttcctctaacggtggaaatacttcccgctggccagcgcgaccttagcatgccccggtgtgcgaaggctaaaagccagccccacttccctgtgctcgcccagtacatcctgaatgagtcggaagcccgcgtgaaggccgagctgtggatgagggagaacgccgagtacctgcgggaacagaggggtaagcgccacccgcccacactcacacgcaggacgcacagtccccaggcctggggcgtgggccctcagtgacgctggccccctttctgaacttttagaaaaagaagcaagaatagcgaaagagaaggagctcggcatctacaaggaacacaaggtgggcgcctgtgacgctgggcctggccttcttgggggtgtccaggttacggggggcaaatgtctctggaatgtcccttccccatgtgacaggagggtctaggccccagggcaggcagccggaggccatgtgctctggaccccagacccacgtccttaaccactaggtcctgccccgtgctggccacaggcgcccagccgtcggcctcaccttggagggcgtgtgctcagctttggggtaaccttctggatgcagcaccggggcagactgtcgagactcggggctggacgctggggtccctgcctgtgttaacgggtttgctcttctgacgccctgggaaagtccgactgtcatgcctccctgccttgtggccgtcacggtgacttgctctgccagcttactctctggcggaatgtgccttcagcctcgtggtgcaggcagcagtggttgagcctctgagtgactgagcaggagaaaacacggggagccagttccctgcctgcgagactggggtccctcagacgaagctggaggtggctgggatggcagatgtggggcctacccgctcagcaggacccggggagcttgtggtcagagagttaggagcccagggactccaccccacccagcagcacgtcccaggccttgctgggccacgcaggaaggtcatcgtgcagcggggggcagcaggggtggtgcaggctgattgccctgaagtggtctatggctccagctcctagaaggagatccagggtcttcgggcagctggggcctttgacgtgggcagcggtgctggggtggattgtctgtcttcactgagtagccatctctgctgcagccctcacagtgcagcagcacatcgccctgccgtgtgcatgtggccctgccctgtgtgggacccaggggcagcagggccctgagcacctgtggcatgtttgctgctgttgctgtctggaggccctgccagcacccatgccaggccacgtgccccactcacctgggagggcaggatttgacgtgggcaggcccagagagcaccaggctggcccacattctggggggaggaggcaggagcggcccttctgagggcctgagccaggcctcacccgcctgcactcctggcctcacgtggagcccctgatggtggagtgcagtgggcgtgactcacgggaggcattcttgcttgtttccctcaagcccaagaagtcttgcaagcgacgggagccaattcaggccagtaccgccagggaggccatcgagaagatgctggagcagaagaagatctccagcaagatcaattatagcgtgctccggggcctcagcagcgccggcgggggcagtccgcacagggaggatgcacagcccgagcatagcgccagtgccaggaagctgtcacgaaggaggacgccggccagcagaagtggggctgaccctgtgaccagtgtggggaaaaggtaccatcctgtcctgagtggctgggttagggcagcagcccagggcgggcagaggcccatggcttcgggtcctggagctgccgggggccagccggggccacagaagtgcctggagtggcatttgccacctgcatgctggggactggtgggccttctccggcaccttgacagtgtctcaactctccttggcctggcaggctgtgagcggacgggcgggtccagctgtcaggggggtcctgcagcctaggctctgttttgtcccaaggaggggctgggacaatccgtggggtcggtgccttctccagcctgggttcgggaagaagagtccccagccctgccgccctgtgcctgctctgcgcaccctggctgcattgccgtctctgctgaggtgatgggtgagagcagcacactgctgaggaaggaggatgtgggtggagaacgtggctgagggacgtcaaaggcgggatgtgctggcctcagcgcacagggtcacgaggctctgcagctccatgcagggccgccttggagtgggtcggcctctgtgcacagcttgccgctgggtggcggctgcaggctctcctgacgaggccatgggcagctgggctcacctgctgcgtcttgggggcctgtggctggtccatgtgtccctctggcagtggagatggggttggcggcttagcttctgggtccaccctttggtggttccgaccttcactccaccccaccgagtctccgggctgggtgtgtctgctggtcctactgcttcttgggatctcttgcgttgtctccagctgcttccgcctgtggggcagtgctgactctcggcagccccgtcagggcctcctgttgtttgcggtatttgcggtggtttctccttggccttttgagctgctaggctggccactgcaccccgcgagagttggctgtgctgtggccctgcccctgcccctcccctggggtgcccaggtgctactctgtgagggagcctgacctcctggcaggctggtgcttctcagccggcgtctcagcccctcaggagggccgcatgggctgtctcctccacatcagccatgcactggtcctctgggggtgcattcctagcacagctcctggcatgcgtaggaggtcagtggggcagaggtgaagtcagggcaggtctgtggctcggttcccctgtgcctgagcactcccaggtccgatctgaggctttagtctccgtgtcctctgcctgcctagccagcctctgtcagcgctggaggtgggggtcctgtcccagttgggtgattctggtgcctggtgacagggttcacagccccctctgtcacatctgaccagctggcccagacagggcccgggtgtgcatgtgtgtctctctgtgtgtgtatacatgtacatgcagtgcgtgtatgcctgtatctgtgtgcatgcagtgtgtgcctgtgtctgtgcgcatgcagtatttgtgtgcatgtgtgtgtgtgtgcctgtgtctgtgtacgcagtgtgtgtgcctgtgtctgtatgcctgcagcgtgtgtgtgcatgtgtgtgtgcgcctgtgtatgcagtgtgtgtgcatgtgtgtgtgtgcctgtgtctgtgtatgcagtgtgtgtgtgcctgtctgcgtatgcagtgtgtgtgtgcctgtgtctgtatgcctgcagcgtgtgtgtgcatgtgtgtgtgtgcctgtgtctgtgtatgcagtgtgtgtgcatgtgtgtgtgcctgtgtatgcagtgtgtgtgcatgtgtgtgtgtgcagtgtgtgtgcatgtgtatgtgcctgtgtctgtgtatgcagtgtgtgtgtgtgcatgtgtgtgtgtgcctgtgtgcatgcagtatttgtgtgcatgtgtgtgtgtgcctgtgtatgcagtgtgtgtgtgcctgtgtctgtgtatgcagtgtgtgtgtgcctgtttctgtgtatgcagtgtgtgtgcgcctgtgtctgtgtgcctgcagtgtatgtgtgcatgtgtgtgtgcctgtgtctgtgcatgcagtgcgtatgcacacagtacgtgtgtgcgttggtgcactcagtacgtgtgtgtgtgcatgtgttctggtgtctgcacacagtgtgtgcctgtatctgtgactgcacatagtgtgtgtgcatgtgtgtaagtttttgtgtgcaaatgcaggtgtgcacgcctatgtgtctctctgtgcatgcagtgtgtgtgcatgcaacatgtgtacctgtatgtctacagattgtggtgtgcaggtctttgtctctatgtacacgtgtgtgcatgcatgtgtctgtatacactgtgtttctctgtgtgcgtggggcgtgtgtgtgtgtcttaagtctctcaactgtgtgcagtgtgtgtgcatctgtgagtctgtgtgcacacacatctgcgtgttcgtgcactgcttcctgctttagaaacccatcagtcttccccccaacatggccatgatctgattcgggaatatttagtgttctaagacggaagcatgaagacctcagggctggggaccccccacactcccacccccactcaggcctgggcagctcaggcagttccagcggggcaggggagagggggtctacctggggacagaagggcttgtcccggttgcccttgcagcccatgggggcagcttttcacccacactcgggtgaggaaaaagggatttggaccacttggaaagaggctgaggctccgacgtggggaggggtggtggggagggaccatcaaggaggggttcagctgaggaggcactgcctcagcccagcgaccacagcgttcctcagcagcagctgtgctgccttgggtggcccaggcatggcagtccctccttgctgtgggggaaccagcctgagctgcaccccctttctctttggctgccggtggctgcctagcccatctccctctggccacctgcccctggtcctgcgtcatgatgcatgcttcccctgatgacagacaactgcagaacctgagctgggccactcaggggtgtgggcagctgagccacgcaggggtgtgggcagctgagccatgcaggggtgtgggcagctgagccacgcaggggtgtgggcagctgagccacgcaggggtgggccatgcatgggtgtgggcagctgagccacacagggatgtgggcagccgctccctccgagcttgtctcctcctcactctgtggtcactcgggctgctttgaccctcggggtcttcctctagcccatgcagatcagtctgtcctcatgcctgagcgtcccactctggggacaggcagaggggccagtgtgggctgtgggccccagcgcccatatctggaagggggacaaagtgggggcccaccagatgagctgccctcttgcctgcttacaggccccaggatccccccaggctgggctggggccgagcttcagccaagcggggtcagcaggtgctggcgcggctgcgagagggagcagcctgagcccaacagtgggtttgcgtgaacaatgggccgcagcgccccacatcctcaggcccctggctggggacccccgtacaggccaaagccatggccgaggtgatgccaggtgggagcttgttctccaggcgctctcaggccctcccgtgtggcctggctgcctcaggttcacacaggatactgcgtggaagagggggaagcccttgagacaggcccccagctagcccgcagaccccaggagcccttgcggttctgcactcatgaacactacgcaccctctctccagccgggttctgcaggagtagggagctttctggccccccagggtgaggcctggcacagctgcttcctggttctggaaaagctggacttgtctgtcaggaccttgggtcagtgcagcaggaccttgtggcttgaatttcagcctgtcctcagtgccaggtgggggagggagggtgtgtccctgcaggaagcgcaccctcctaacagcaccgctctccctgtagccccgtattcctgcccgccagcatctgctcctctctagctaaggtacagtctgccaaagtcaaagaaactgcctcttccagaggttgcagtgggccgagatcgcgtcactgcactctagcctggcgacagagcaagattccgtctcagaaaaaaaaaaaagaaaaaaactacctctccttgagccagcggggtctcagggcccttctcaatgggggcctgctggcctcaccttccagagcatgaatctcctggggacttagtcccaccggccaagatcaggcctcccacccaactgccaggcctgcctcctggagcgccagccacttctggagagaccacagtggggtgtctcattgaggtcagcctgctgagaagccccgctgcagggccagctgccatccccagaggcccccactccactgcacagtgggcctggggatgggagtggggagggcggagcagcagctgtcaggctccaggaagcaggctggaggcctggcctgaggatacagcaccaccaggagccctggtgtccagactgtctccagtctggagagggaccacatggggagcccggggcctcagcctggctcacacctgctatcagcttcaccccgagcagagctccacgtctagatgttctgctaaggtccacctgtcatggggtcccttcccagtgtcccgagggttcatctgacacgtcagagccaggcagggccctgcctcaggccccctaccgcctccccacacagctgtgccctggagggaagggctctgccccgctgcgtccttccccacaggccctgagccctctcattgcccgcccgacagccctgtgtgtccgtgctggaggttgtgggtaatgcctgcgtcctctcccctgggcccccctgtctccctggggggaccagcagtctccaagaagacttggcatgtggaaggcacctttggcctttgtgtgtggcgggccggcgagcaggccctgtgcagggtgttgtcagcagatgtagggattgccctgggcctggtgagggttggggaagcactctcgggtctgacagtgtcccttcaccctccctcccctcctccctgagtgaggtagggcaccaggcagctccttgagggctcaggcactgttggaaggggagtgggctggggagcggggcgtctgcagcttctgtgtttgtgtcgagtgctgctcgctgttgagaatgtgaacgggtcagagctctgtgttgatgtgcagtgagcactgatggagcacacagaacctggacgcagaaccaggcttccaaagggacagagaaacagtcaattaacactgggaaagggaagatgggcaaaagggaacaagtgggcaggcgttcgggagcctgggctgaggccgccatgctgtgcttccttttgcaggttgaggcctctggtgtctacgcagccagcaaagaaggtggccacgggagaggtgtgttgtcccacgcagccagggcagggagaccttgggaggcagcccacttcttcctgggcccagatgcttggtctgtgaccacagggagagcaggcctgacagaggcgcctgcccctgctgccccatacttgcctggcatggccagagaatcgaggcccgagggtgggagctcccggttgccggagcaggagcgggcaggaagtggggaccgttgtgtgcctgctgctcagcgctcgggccaaggctgagcagccttgctgtgggcctggtgcctgcagggagcctgtatgtaggaagcaggcactgccaggtcacagggcccagccctccagggctcaggggtctttcacctggactgtcacttgttggggactggtctggcccaggaaacgagggtgaaggtgctggcaggtggcgggggctggggcaggggccggagcagagcctctgtctgtgttctgggggtcagggcaggccaagcccccgggggctgaggccacagtgtcctcggccgaggcctatggtctggaaaggtgttctgcatgctccccgagcactggggtggggcccagtaggatacaggagcaggggctggcagaggcctgagggtgggatcttgatgctgacacagctcatggcacagcccccaggaggccagaaggggccagtgggcctgggagccctggccaaccccgggagccactggtgtggcgggagtggctgagcatcctgggccagccctggtgggtctgaggggtctgttgagatacacagggctcccagctctgtgtgtgtcagagccccacttcgttccaggctttgctcccaagctctcccaccctcggagctgagcctgccaggccccaggcggtgctggtggagagcgggcccgtgtcataccacgccgacgaggaggctgacgaggaggagcctgacgaggaggacggggagccctgcgtcagtgccctgcagatgatgggcagcaacggtgggtggggcccgacaacagggaggggttcaagggaaataaaggcatcagctactgcccctcatgatccctgaacttgggcctgttagcttcaaactaaatttctgtttctccctggaaagaaatttgaactaagacattttgtaaattggtcatgtcgattgtgaggttggaggcagccagggtcagagaggctagggacggtgaggtacccaccacgagggccgcccagccagcagcacgaggttcccggatctgcacaccaccacggacctgcacacccagggagggaggctgagggagcccacactgctctcaggtgccctcgacgaggagcaaggccctgctctgggtgcatgccagtcccgggaggtggagaggagcccaagatggctcctggcggggcgcggggggctggggctggggctggagcctgagtcttctaggggggcaccaggaacagggcgggttggggggtctgggctcctgggtcccacagagaccctgggcttcatgactgtgctcttctgcagactatggctgtgatggcgatgaggacgacggctactgaagtgtggcctccaggcaggtgatgtcctggcagggggcctcgcgggtctcctcagcatcagacgggcttccaggaccgcagcaggcaggccccagcgccgagactcctggtgacaggtggcacctgtcccacagccctcgtcccatgtggaacttaccattgggattgtgtttctattcagcaagggaaaccggaccaagcgtctgcatgtgtgtgatcagatgtgggccgggtgtgtgcagggctgggtcccgctgcctgccgtcgactcatccaaggaccctccaaggctggcagtgtggtgttgctactattaaggaaacaggcttggggcagccccactgctggtccaagtgtgtggagggctgagtgtgctggccctgtgactcaggaccagctctggagtctccagcccaccctccgcaccgtcccctcctgagcagcactcggcgccagcagcctctgccagagtggaagccagagccctgcaggtgtccggcgcagccgtgggagctgaggatctggcacttgagaggcagcagctccttgaaggtcctctgcctccagctgtggccctgcatccagatacctgcctcgtccgaggcagacacccccacccctgcctcctccagacccccctccccgctgcctgcaccgcctggagcagcatgggggtcagacccctgctccagggccacttgagttgtgggcccaggagccctgcggctgccggcaggtgaactgagtgcccgacagctgagaccggcgcccacccgtcctgagcatagctctgtaggcagtgcgggcatagcctgcatagtgtcctggcgctgggagttccccgtggacagagccagagggcagtggcgctccctgtcagagctggatcaggccccccatcgaggagggagggcagacggaggcccgagagcctccccaggcctcttcgtgggaaggccccagtaccactcgtaggaggtctcagctctggcatggctgccccggatgtggccgagggggcttcaccctgtgtccttaggagggggtggccttgaggcagagccgtgcctcactgacccccaggggcctcatcctccccatggaatgggctgtatgtcctgccccaacttggcccgcagcaggccagacccccctacccccgcccagagctcagtagccagcctgggtcctgccagggcttctcgagggcttgggggaagaatagatttagtaaagcaggaagatctgttgttacttaacagaaattgcctgaggcttgtctgattctgtgttgcgatctgtggccagccgtcatgtcggtctgctggctgcacggcctggctgtggatattagcccctgagacccaggggctgccctgagtgaggggtgtggggtctttaggtccccccaactactgcagcagctgttgagtgggtgtgcatcagcctgggctggacatgggtgtgccacaggggaccgggtggacaagtccccgcttgggcccccagcgcagtgtgggcaccgggaggtgagtgctgtgaagaaagtgaaacggcaggaccagcccacaggggcttcactgaggctggggtaacaggaagcagcaactgggccagggtgggcgggcctgggggccacagctggcacccaggggccccgagggaggtgcaggtgggccgtgggaccgcaggatggggggcttggagaaggtgctcttagaggaaccctgaggaccagctggaggggctcccggcctagcagatggccactggggccgggccagagacgacagccaggtggcatggagtgggggtcttgttggagatcgaagagggtggatttggggggcgaaatgggtgaaacctgccaccagatcttatttggggaggagaccagacgtgcagctgaggggcgcaggcgaggcaggccgtgcagcgatccagccctcggcctgggtgctggggtgcagggcggggggcagcgtctgactctggtggtgctgtttgccaggctgtggggccccaggcacaggtgggctgcagctccgcaggagggaaggaatcctcatcccgggagacctgctttggggccagttgggtgttggagggggtttcaggacagacagctctggctgggcacttccactcgggaggccaggaaagaaggtttccaggctgcctgtgcatgagcggcttggcccacaggtggttgaggatattggctgaacggcccgcctgaggctggagggagagggaggggtggagaggtgggtgggaggtgagggccaggggaaagggaggcccgggaggcagtggctgtccaccctttggggatggaagcgggggaggttatcacagaagggggagggtggggtggggctcgggggctggggcgcgggagaggatggctggggtttggggctgaggagcacaagcggggccaggcggtgaccagtgtgctagagtcaagccccacaatggctggaggggaggtgggacatctctgggctggtggcggaaagactcttccccagagagggtgcggtgtggaacacagcatccgggtcctggagccgtggggacctgtgctgcacagacacttgggtggccgaggtgcggaggtgctgcggcccgggagtagacagccgtagtggccaggtgcttttgggtgctggcctgaaccgcgggtttgggcattcaggtctgtattgctcagtcccgtaggtggcttaggggccacatctcccagcctggacgctgacaggcctgaagcagtgcttggccagctgtgacgctgcagctgcacggggcctgccagcatgtccagcagcaccttgggcaggttctgcctgggcccttcccagtgccaggaccagaccatgctgcagcctcggggaagggggagcccagcctctcagccccgcatcactattcttagcttgctagctgtccccttgaatgctgccttccgggctgggcctgccaggcatgcacaccccagccctgagcagccaccgccgcctcctgctgcctgctcagagcagggccatccgaggctgttacgagctggcttaggaacctggtgtttggtggccgccaccaccccgtggataccacgttacagtcctgacaggactggagaacagccagttgggggctcagtggtcctgggggctccaggactttgtcagagcatgtgtccacctttgggggtgcccgggagaagtggtctgcacagctccatagagcgagggggtggggcatgtggggctcaggactgggtcaggcccgaggctccaccacagccggccctgagctccattgtcttggtccagctgttctgtgcctggatggctccttctttgcagcccatggagctggggtggggagagccccctggaggaatccccttgagccagagttggagggtggggcacgagatctgaccctttgccgcctctgggctccttgccaagtccttagggatgtctgcccagtgacctcactccctgacccagagaacaagctgggccacgccccacacccctgtaccccaactgcagggggctgccatgcctgcccacaatcttgtaccccaactgtagaggggctgccatgcctgcccacaatcttgtaccccaactgtagaggggctgccatgcctgcccacaatccctgtaccccaactgtagaggggctgccatgtctgcccacagcccgtaccccaactgtagaggggctgccatgctgcccacaccccgtaccccaactgtagaggggctgccatgcctgcccacacccctgtaccccaactgtagaggggctgccatgcctgcccacaatcccgtaccccaactgtagaggggctgctatgcctgcccacacccctgcaccccaactgtagaggggctgccatgcctccccacaatccctgtaccccaactgtagaggggctgctatgtctgcccacaatcccgtaccccaactgtagaggggctgccatgcctgcccacaatcccgtaccccaactgtagaggggctgccatgcctgcccacaatcccgtaccccaactgtagaggggctgctatgcctgcccacacccctgcaccccaactgtagaggggctgccatgcctccccacaatccctgtaccccaactgtagaggggctgccatgcctgcccacacccctgtaccccaactgtagaggggctgccatgcctgcccacaatccctgtaccccaactgtagaggggctgccatgcctgcccacaatcttgacccatgctcatttggtccagccgtatgggtgtggaccacgctggccaggggagggacaggccgggcatctgtgcccctgactttggcttcctcaagtccctgcaggggcgctggttgtctccaggccttcctgagcgcaggtgctttgcaggagactccaagtgccagagggagcagttcccatgtccagcacagctgacagcggatgacccagcagcctctgtctagtgctgaggagcaggggaagaggagcgagtgtggccagcaccctctgcagctggctgcctcatgctgggtgggcgcctagagccttaccctgtggcttggagcgaggttgggggcaccagcaggtgggcggattggcagcttcagagtcgggccccaggcaggtccagcccagctgctgctccctgtgtggcagagggggccagacactcccctccccactggcctgagctgcctgcctgggctgagtgttcaaggcaggctggcatctgcccagagctgccaagagcaggggcagggcctcaagggcggcagtgggagtcggggctgcagaaggctgtggccccagccctggcagtgtgtcctcgtggaggctggctggatgttttacttggggctcggtccttccggctgctggcctgggcggcctctttctcttctggtgccttggggaggggtcccccagcaggctcagggctgcaaagccggagcattgctggggtgggagggggcacctgcatggcctctccccgcccctggcctcccaccacacgtctgaggctctgcaagggcagaggcagcagcgggccccacgggggaggggcacaggaccaaggaaccccaaggaccctgggtaagcagagctgggccctggggagcctctgttggcactggaggggcagagccctggaggttctcccatggcccggggctgtccccagatgtggtaagatctacttcaggctgggagtgtgactggcagccagccgccgtggtctctgccagggataccccaacttccccagccttccacagtccgcaggcctctcgtgtacccccactgtgcttggcgtgcaccagccaggggccggccctttgtggggatggagcacatctgcatgtgagtgtgcgtgcatccatgagtgcacacgtatgcccgggcatccttggagcatcctggacccctgtcctagtgtggagtttggtgttgtgtactgggaactttgtgggaccaagggccaggacccaaggccagccaggcccctctgttcacccacctaccccagctcagcacataccgctcagggccagtgggcaggaagcgcgcatgtcctgcccaatttcaggtggggcatagtgggcgggttcggcccactcatgcagccacagagctttcctggagtttcctgccctctgccaagtccaagtcacctttgcccgcatgccagaggggagggcagggcaggggctgagggccacgtgggctgctggctgctggctgctggctgctgagctagagtcagccagccagagagaggacggagctggcagcctcaggggcacacgtgtgcaggcatgtgaccatccacagagaaatgcataatgcccttacgtacgtgtgcctgtgcacacctgtgagtgcccttccatgcacaccacaccctcctacatggccgctattcatgcacacccagtacgcgtgtacacgtacacacattcatccgcacacacgtctgctcgcacccatcccaccaccatgtgcacgggcttgagcgtgtgtacccagacccacacctggatgcacagatgctgagggccgggagcctctggaccagctcagggtgtcgggcccggttggggcagacaactggccgcagtccacacccacatggtggctgagccctcggacacttgtgggcctgtgggtgatctttctaatttttaaatttctttttgagattgagtcatgctatgttgcccaggctggccttaaatccctgggctccagcgatcctcctgcctcggcccccagagtagctggaactgcaggtgtgagccaccgcacctggctggggatgctcatggtagtttctcctcacaggggcactgtgacagggcccaggagtcaccaggcctgcccctgcagccactccccacagatgcagcggggagggatggtctgggggcttgtgtctggtaactccagcacctgatggtcacccagcccacaccagtgctgtgtgacctggcacctgctccatccctcggccacagagtggggagtgaggtgagcttcctggcagttcggggagtgaggcagcgccaggctgggtgagcactccagcgtgacccccccactgcccaggcccctggaataggggacagcagacagtcccaggctcccccaacccccaggtgccttctgttgcccacgtctgcccctctgccaaacaggcccctggtcagcccagccagggtgggtcaggaatcctgggcctgggctgagcattactggggcagcaagggacacctgcagggtctctcactgaatgagaggttctgcgagggcagatgccgggcagcccctgaggatgcccccacccctccctctgcctcctgctccccatcccccacccctcccttcacctcccccccatcccctccctccacctcccagcccctctttccaccgtctgtcccccagtgtcctccaagacactgacagaagccctcttctaggcctgctgctgctctctggtcctgttccaggtggggcaggggctgctgcatgaggagctgctgggcctggggccagaaatgggggctcttttgtcactgtctagagtctgagtctgccaccagggactgccacccgctcccctggtttgagggagtcgggcaaaggagtgtggagcacgcccttcccagcccccacagctgggtgatggtgggtgggggccgccctgtggttctcccatggagcttggaggtggtagcgagacacagcaggctgacgtggacccgctgagggatgggcacccgggatccaggctcctgcgggaccggcctgcccagtgtgtccgggagactcggctggcccgccccctggcggccacgggcggcaccatctggaagcggacatttatgttcttgggacacttggccttttcccgggtgatgaagcccaccttgcaccccatctggtgaatccggaggccacgaagatgcctttatgttcttaattgttgtatcaggtctttgttgaatcttggagccctgcctggctggtggcccccaaccccacacagcaaggccttctcgccttcctcctcggtccttccctttcagggtctgaggaccccttggccaagacggtggagacaggctcggaggaaaagtaaccctgagccttgggggcttcaggagattacctgcccctgcagcatcccagtccctgtcccagtcctggcaccagagaccttagtggggccctggacacaccccaggcctgaacatcccagcctcctctgcctggggtctaagaccttcaccagcaaggtgaacagacggctggaggcctcagagtgcagagctctgccagacccacctgccacctgtgactctagaaagccctcaatcctgccttcccctgcaggactggtccccaatttctgcatctccaggggcatcccaggaccatctggggaagcagggcatgcacacgccctgaggcagccccgcttcgagtcccctgtcttgtgtgaggacagatggcccttctcaggccttgagtgccaggaccctctgccctctccagcctaggtgcgcctgctccagggccaacaccctccagggtcccttggctgtccgcccccacagggctcagccaccctgcagatgtaccctggcctcttgggaggcaccgaggggggtcggttgcctccgtctccagcctgtacggagtccgggcccaggactctgcgtccttccaagctctgatgctgtgttgagcccactgcctgcatggttctggccggcggcttcctgggccgtcagtaactgtccctgcagcctgtactacgtgtctggaggactggcaggtccctggggagaccggggcctgggctaggctggtaagaggtggcgccgggggcaggccccaaggctgcagtcagtgcctgaggctggcccaggcccttcaaaggggccgtgggcggaggcaaagaggaggttctgtgtggttttcctgcccggagaggaacctggctcaggaagccattgtccccacacaatgagcacggctggaactgtgaagtcaggggcgctaggctgggggacccaaccctgacctcaacccgactctgttccatcactgatgcccccaggactgacaccccagctcaccctggacagggaggagccacagctggggtcggggcactcctgagcagtccggggggcctcgattggggaagtgcccgcagctcaggcccgctgacaggcagggagggagcgttacatgtacccacttaacagcaaagctgggaccacagaggcccaggaggccctagctggactgagattgggataggaggccgggcagaaggcccagtcacacctgcccaggggaggcagtgcccactctgccagacgatgtggggaccctcctttcctttgcggccgggggcctctgcaccagcccgactgagtcattgctgcctccctgtggacaataacgttgtctgccaggtacccgccttggtggagcctgggaaaatgaccccagcctaacccggccgccagcacacctcgggggctggcccccatggctctgctccagccttgaccacccacccattgagctgagttggccgctgtgggggtcctgggcggcagtgcagggccggactgcaggtgccacagaacctggcaggtggaggcggcactgtgggctgaggctgagctagggtcagcacctgcaggccacagcctcgcctgcctggggtccaggaacacacatgctgggagacatgtacccagcatggagacgatgttcgagcttctgtctctgtgctctgcccccgcggcgcccggaggatggggagtggctgccatccccacacagcccaccctccaggcctcaccccttcggacttcccctcccacaaatccctgaccggagcattccctccagctgcacgtggggttctggaaaatgcgtgtttctcatgcatttgttcatggattcactcagcaagcgtggagaaagcctgacagccaagtgcgtgcgcagagtcggcgaggatgaagcagggaaccgggaagtgctgcccacaggccagcgcccctgtccttgtaggggagatgcgcttcgagccaccccctccccaacaagatccataggcacaagtttgtgcagggaaatcagggcgtgaggcgcagcggccggccggcagaggagaagtggtcttgccagctgctggagggtgggctgtggggctgtgagcagagcgcatgcttagttccattttggagcactctggggaggggatggagaagggcccagaggatgggggtgtccctgggtggggccgggaggtgggtggaggaggagatgagactggctccctggtgaaggtctcagcagggatttgttattaggggagggggacagcggaaaggagtaggttcaggtggggccaaatttaggggcctgtaatgtgtggagggcctggggctggaagagcctgggatgatgtgatcctgggaggtgaaaatcagggctcagcagcctgctggtggccttggagggccctgggcacgctcttgggctggtgtgtcccggcctggctcccggggaggttgctattcagagacagtatttcccagcccaccaaggggaggggtgtggtggtcacatggccactgggggacaggtgcatctgtacatacccatgcacaggatgctcgcaggctctgcaagctgggggaggcccctcgggccctggccatcaggaggcgctgcgggacagctgggtgggctgtgtggggtggcagcctgaggggccctcagtgcctgtgtgggtgcagccctcttgcaggtattgggcgtgtgtgacagtgtcatgaggagggcaggagcctcgccgatgggagaggaggcctctagggagggaaggagtccactgaggcagctagctcctttgtcacttaaatggggtggccacctggatttggggtcggggcaccctgcacaggggagcttcctcggagctttctctgctgcccggcccaacttccggcccaacttccattctcatcctgaccggtgcagtgtctccaggcgagttgggcgagggtcgcaataggatggggttggagggtgagttctgccttggggacacaccaagctcaaagacaaggtccatggggtggaggcaggagaggcagcctcaatgaggcggggctgagagggctctcaggagcccataagccttcccagaggaggggctggccggctgaaatgggctacagaaggtcccaggtgtagaggtaggtaggccttccaacctaggactcaggcaacagagggtgtgtgacggcagggctggtggctctagggagagcagggcagaggtagggagagcagggcagaggtgggcagagccccacagccagggacagcaagggcctctgagagtggggggctggagtcccctgaggctggggtgtcatgctctttatagtggaggacccccagccggtgggtgggagcaggtgcagggccactgaggaggaggtgtgtgctgggcggtggcagtcctgcagcccaggccagatggtggggtgaggtggggacggggtcctctgctgagagccgggagtgggatgttcgggtgctgggctctggatgagtcactgctcaccaggccgcccggcgccagcgggggcctggccgcaggaagcagcaagggctgatcgagggcaggaatggaagccgctggacctcccacttcctgtggcctgagagctggggctggacgccggtgtccaccgcctgggctggatggctcagaaaacagaatgcacaaacgccatgacctgcgtggctgagcaccgggggcgtgcaggatctgtcccagtgggtgcagggagacccaggaagcttctgctcacacaggaaggaggctacagaagggctatggatcagggtggagtggagacggtggtcccagcagggccacaaccagggccaggccagtgaggtggaggagggtgtggcaggcaggtatccacttgaccaggcttcggagagggttcaggggtacccaggagaggggggtgctcacagcacatggtagggcactctggggctggctccttggatggcggggccctggttgggcaacgatgctcagagcccctgagccagaaggcagcctgcagcaccccagcatttctggcatactgtggtcaccaccccagcccaccagcaggggcccagggtgatcatgctcagcaccaccgctgccaaggtggtcctgtaggacctgcataggggagcttccctagagctctggtcacagccccagcaccctctccctggtacccccacctgacctgactcctggggaccccagcaaataagcagtcaccactatccacctgccctgccatggcttgccaccgcctccaggttgccactccagagccttgctcctgtccctggtccagcatggcctcagctcctgctgtccccacctgtgcccctgggactccttgccctccctgtcagcacccggctttcccctgactggggtctatgccccgctgtccctgcctgtcacgcctttcctctgtcacctcctcccttggcaaactcaacccaagtgccacctccaagaagccttccttgccaccctcacccccatggctgggccagaacctgctctgggacctctgcagctggcaagtgtctctttgtcctgactctgctcaccttgtgtcatccctgtcctggccagtggcttgctgagggaggggtctgtggctggtagagatgatggcaagaagtgccatgggctggacgtctgtctggggcttgccaagaccaaagtgggcctgggctatctcatcctgcccagaagagaggggctgcctcagtttccccaaaccttgagttcttgctcctccttcagcccccagcccctgacccctcccagtgccacacccctcctgtgtgattatctaatcctggggcagccaggtgccaggctgctgcgggaaaacgctgagacaccccaacccctcccggcccttgccctaatgacagctctgcacctgcccacacaaagccttcccagattcgagtgggaacgtggtgcccctgagccctctggagccagcacagcgctgactcctgatctccctgggtgctcaggcctggggatgggggacagggagccgcctcttcactggtcctaggttcagtctctgccaacacagagctgccccaggcctcgggaggaggtagagtcttcaaggagagtcttccggaaacatggccctcgaggactcggaggctgtcggacagtcctgcagagtccaggggggtggggggtgggcaggaatgtggcctctccctcccgatggccctgccctgaggcccagctggggaggatgttccttggagcagaccccccccaccccatgtccccttgccgcatacacaggcatgaggcccaggctgcccctggggacagcaagtgaccgaaccctgcagaaagccaggagatgctgcagccacgtggccagccctccctggctgtcattctgtccaaaacaatgcgaaggaaacgcagccaagccctgaggctctccagtgtcatgacgtctggtgcattttggggaaataccaaacatcacgccctcttaaaagcgcggcttccttggcgtgcacaagggccaggctctcaggcagctgggtagagtctggcccccacatactctcgccccccaccccgaccccgcctgcccagggcttgggccggacccccagaccccagggcggggtcaggtgcagggacggggtcagatcatagagggcccagactgcgggacccgccgtatcctaggggttcagatctccgggcagggtcaggtgcaaggggcagggccagatcccagggggttcagttcgtcgggggaggtagaggcggggccagatccaagggggggtcagaccgcggggcagggtcggggggcaggtgctagggtggctccccggtgcgctcctgggattggtcccgggcgctggctcctctttagtccccagcggggcgggcacggccccctgaggccgcagctgagcctcccactcccggcctgcggtcccgagtcccggccgcacctgccgaggcccaggccgcgaaggagggaaggccgagccgggcattagcccccgcgccgggcgccgcggggagggtcttatcagcgcgggcagctggcggcctgtccctgcgcgagcgccccggcccaattcaatggccattgtccgccggtccctttgttctgaggtgtccgcttcctgccaggctaggagcgggcgggcaggaaaccctccgagccgaggcccagacgaggaggccggcccagcctggggtcagaggcgacggcagacctggctcggggctcccgggggctggggagtgaggctggggctcggtgtgcggtctgcagggcgggggcaggagcgggatgtcccctccagggggacactgtgagggcggggctcccgcctccagatcctgcggcgctgggggcgggtggaggaaggaggaggaagaccctgagacagagggtgcccctcccagctctgcagccttcctctgctccctgctggatgacaggctcagagagagcgagggcaggctcaagtttcagggtcgtgaaaacccagcgcccacggcctcccatgcggaagacgcccacccaggaccgtgggctgggaagaggggctgaggcctgggaggggagtgatgcggccagggttcatccctccttcacgggggccctgcggcgctcctgaccatctgaggccgtctccaccccctcgtcctctctcccctgtgctccacgctgcccattcaccaggccccacaggttcgcccagcacagcaccctggttggctggccatcggttgtaagctcacccgtagctggggctgggtctctgggagctggtgggagggggagttggcaccagtgccacagcccaccggtgcccaccagagctccccatggcactcgaggccactgaaccagctggagcaggatggccacagccgctgctcacttcccaccatgtgccctggggtctcctgcagttcctttttccgagaccccctgggtgccttcccagcaaagccctggccctgactcaggccaactcaatcagcaaacggaagccaccgcggggatttcaaacagcagaacttaatgcgaacagcttggaggggatgcaggaacgtagagaggagagtctggcaagccggaaatcaatttcctgctgcaagaggcagccggcaggtggggttggggggggtgctagccaggtcccactgctgccgtgtccccacagattgggccagtggttcaccccctcttgctgacgtccctgccgtcatcaccactgcctctttctgtccccatgtccgccaccaccatcatcacctgaagttgccactgacggacaaacatggcctgtccctcctccttctggacttccttggacagagcttccagggaagtcagcaagagagtgtgggagatgcggaggcagccttccctggtggagaggaggccccccaccctccagctcacgggcacggtgggccccaggtggggaggaggccccccaccctccagctcatgagtacagcgggccccgggtggagaggaggccccccaccctccagctcccaggcacagtgggccccaggtggagaggaggtcccccaccctccagcttacaggcacagtgggccccaggtgcagaggaggtcccccaccctccagctcacaggcacagtgggccccaggtggacaggaggtcccccaccctccagctcacgggcacggtgggcctgggggccacgtgcacatggctttcagcattcccacctacagctcctcccgggaactcgatgagagcaagccaatggccatcccagcccagctgcttgtcccttggacaagtcttccctgcctctgaggctcctgggggagttcacacaggtgaaaggaggtgccagatcttagtgggcactctacaagcagcagcacgtgtttatgaagggcctggcacgaaccggggcactctggggagccatgccatgctgcctatgaaccagagaagtggggaggcagcccttggcataaggagccagagggcacacagcccaggaaatggaacagggccctgaatctgagtctcctgtgtgagctcaggtcctctgagaagaggacaccaggatcccatgcaggtgcgattcagctggggaaatgcaggtgaaggatagagaggggaggaggcacagcagcagggagagcctgactgacgcaggggtgctgggaaggatggaggtaagagagctgggtggtgggtgggaggagcctcagagctggggctgcctgggcacgatgccagtgtgatgcggggccagcgctgggcagctgggcattgtctactggctcctgcgtcaggatgtctgcacacagcctcgtcacagccatcttcacctggtggcagaggagggcatgtgtgtcccccgggggcagggtggtcccacagtctctgtgtgctagagactcctaaggggagacttgggggatggaaggaagaggggagggggtgagaaccttgaagaccagaggccccagggtggttggccgggtctctgcccaagagagaccaggaggcaagtggtcccaggaagggcagtggtctgggggcgggttccaggctgcctcgtggtagcaggagctcctcaggcttggggaccacacacaggttgtatacagagctggggagagactgacggcggctgggccctcagagcaatgatttggagctgggtggattctcccggaagctgggggcggggtgcagaggagctatgcctcggttggcaggaacctccgctgactcctcctgcaccttctttagatctcccactgagatgttgccctccacctctcttctccagaagggaaagatgttggggtgccctcaagtttcctttaccatgaaggactgtcccctggcaggtcagatgtcccatgggctctgggctcactcaggagcacatgctttccaggacccgcaggcactgggcacctgcagccatggcccctgtacagtggccctccctggcctccccatgtccagggacaccccccactccccagccactgtgggctccatgaccaccactcccaccccacccttgctgcctgggcacccacagcctgccctcaccacagcccctcagtgcccaagcaccctgtgcctggctcctcaggaagccctccgtgatttacaccagctgtgttgatgcgtgtgttctggctgctgggtgtggagctgaagcctaggaagaaggcaggggctccctggaagggcagtgggccctggcccggccccggggggctggcagagcggggaggctctgggacactgggcctggcggtgttggctggggcgcggtgtgggggctgtctttgtgggaggtccgtgcgtgaatcaccccttcaggcacaggcacaaatgcaggaagttgccattctactgaactctattttctctcacagaggggaaagtctgtcacacgaagggcattgttccctgggctagcgctttccgggtgggcttgctctgcaacgggggctggggctcacttggtgctggggccctgggctgagccgtttcccttcgagacccaggggcgcctaggggccaggaatgggggcctcggtccagcggccagccccaggtgacacacgtccacaaggcgggtgccggcaggagcagggctgggggcctatcgaaggaggggctgggtgggcctgagtgcggcaggtctattctgtgcctggcggtggtttccggagtccccatgtacagggtgggctggggagaggagggcagatgtgtcctcctctgacttgccacaccctccctcctcttcccaggaagggaccataaggcgttccctaaaactgtgaggccagcccagcccctgcccccaggcaaggcttgcagcccccagccctgctgtgggcctgtttggctgctctgtcttggggagaccctgccgtggttggggaatgcggctgggccgagcaggaggtggagcccgagagtcctgcggggatgtgtggggtcagcgtgcagaccgagggtcctgcgggggtgtgtggggtcagcgtggagaccgagggtcctgcgggggtgtgtggggtcagcgtggagaccgagggtcctgcgggggtgtgtggggtcagcgtggagcccgagggtcctgcgggggtgtgtggggtcagcgtggagaccgagggtcctgcgggggtgtgtggggtcagcgtgcagaccgagggtcctgcgggggtgtgtggggtcagcgtggagcccgagagtcctgcggggatgtgtggggtcagcgtggagaccgagggtcctgcgggggtgtgtggggtcagcgtggagaccgagggtcctgcgggggtgtgtggggtcagcgtggagaccgagggtcctgcgggggtgtgtggggtcagcgtggagcccgagagtcctgcggggatgtgtggggtcagcgtggagaccgagggtcctgtgggggtgtgtggggtcagcgtggagaccgagggtcctgcgggggtgtgtggggtcagcgtggagaccgagggtcctgcgggggtgtgtggggtcagcgtggagaccgagggtcctgcgggggtgtgtggggtcagcgtggggtctgagggtcctgcggggggtgtgtggggtcagcgtggagaatgctttatgggctgatgtgctacccagagaaccagggcatcgtctgcaaaggtctggggcagcgggcacccctcccacatcctaagggcaatgccagatggggatggacgagggagccatgtcggaagtcccaggagaagcagcactcgggagccgaggtggaggaggaagaagccacccctgttctcccagctccatggggggctgggaattgggctgagggagagaaagtgacttgtgtcttctccttgggccagactccgcggcccaggccagagcctcgtcatttatgagctctggcctccaagcctgtggctgcatctgaagcccatggtggacacctcctgctgctgctgggcccgcccctgcactctccggaaggcactgcccagtgagggtggtctagggagcacccgcaggccctgccccaagtacccaccacccagccccacccgccccatcccatgacggggaccctctcttgcgccaggctgccctggtgtcccaggggccccatggggtgtcggggcacacccagaacacgtgacgcccctctgttgccttcgtagtcctggaaccacggtcgggagcaaaacagaccaacagaggagacaggactaagtgagaactgtccacaggcttggaacacgccgcgggcaaagaggacctgggcccagcccctcaggcactttcggctcctgcgggtctcagagggcctgtgtgccgtcggcgggtgctatcacctcccaccttgtgggtctgttcccgggggagatgggtctcagggggaggcggctggcatggcaggtgcgcagccctggaagagaaagaagcaaagtgcccacctatgccagcaagaagaggtggactaggcatgcacagaggggccggggcagggcagaggcccaggaagaaccacccagaggctcagaggtgccccggggaaggggccagagctggacacgggtggtggtggggtttccccagaacacacagtggtgggggcagggtcttggagcctggggaggtgtgggcatcctcctgttcaccccagggagaacaggtcgctggaggaggactctttgaaaatacaaagtcagaatttccctaggttaaagatgaacagctcgagcaggaagggctcacagctccagcaggagggtggggcccaaggcatcgaggcatctgacaacaggccctggggctcaaaggcacgtttgtccccctccccatcgctcagcgaccccctccccatcactcagcgaccccctccccatcgctcagtgtccccctccacattgctcagtgtccccctccccatcgctcagcaaccccctccccattgctcagcgacctctgctgctgctcccgggttctgcctgggggaccttccacctttcctatgggctccccagcccttctcacccagggaggcccctggagcactgattcagggccctccccacctgcaggggtcgactcacacgctccagctttcgtgtacatagccagtgacacttcacaaagttttccaatttgttttcatcgtagtaaaagatacacaatgtaaaatgtaccatggtaaccactttttaaaagttttttaaattgaaagagtaatacatgccatggtaaaatttaaatagcacctaaaagtatgcagtgaacagtgcattccctaccagagtcaaccatggccaacagtgcttgtgtgttttatattgtgttaaaacatgcaataacaacatttaccatcttttttttttttggtgggggggttaagatgggtcttgctctgtcacccaggctggagtacatcatagctcactgcagcctcgacctcctaggctcaagagatcctcccacctcagcctcccaagtagatgggaccacaggtgcaccaccacgtccagctaattttttgtagagacagggtctcgctattttgcctaggctgatctcgaaatcctgagctcaagcaatctgcctgcctcagcttcccaaagtgctgagattacaggtgtgagccaccgtgcccggccatcttgaccatttctaagtaaacagctcaggattgtgaaggaacattgatggcgcacaacttttgccactatcatttccagagcccttcattgtccaaaactgaagcggttcccattcaacaccagtgcccccgtccatgctccccagcccctggcgccaccaccccactttctgtctttataccttcgactcctctaggatctcctataagtggacttgggcaggatctgtcttttttgggactggtgtatttcactcagcataatgtcatcaagggtcacccatgagtcagaatctccttcctttttaaagctaagtaatattccgctgtatgtatatatcacactttgcttatccatttctccatcgatggacttcagctgttttaggtacaagttttaaattttcataaagcccaatttgtctatttattatcttgttgcctgtacctttggtgtcatacccaaaaaagccactatcaaacggaatgtgttggagcttttcctctgtttcttctcagagttttatggatgtagctcttgtatttaggtctttcatccattttgagttaatctattttttttttagagacaaggtctcgttctgtggctcaggctggagtgcagtggcatgatcgctgctcactgcagcctctaccttggtctgccagggtgctgggactacagacgtgtaccaccacacctggcccgagttagggtgattagggtggttggtgaagatccagcttcctccttttgcatgtgaatacccagtttcccaaggacgcctcgcactccacccagctccacaacaaacaaaccacatctgcccttgctccaggtgggcccacctcccaggtgcttgggccagaaaacctggggaatatctctggctctcctgtttccttcatgttgaactcttcttggatctgctgttgggttacatcctggatccggccacggctcattacgggcctgtggcagacacagtgtgcggaccacccccgctctcatagtttctaccacactcggcggcagaagccacaggagtgagtgacgtgccccaccaccattctgggccggctccggttcccacaccacctctctacactatgcccccccctttttttttttttgagaaggcctcagtggtcttcagcgtggggccagttctgccgtctcctttccctctcccgacgtgattattttgaagtcgatcctagatgtcgcctcctatttcagttttatctctaactcgtctttcagaaactgccagctcaagcatccccaagccaagacgcgacaatgtggaaaacaccgcgaacagggcaaacagaacattctccacatggacacatgttacgtcttcaaacgggcctcagaatggcctgagaagtggaagcagcccctggagacagacagacgatgaagcaatgcctgcaaaatgctggaggaaagtgacttccagcctagacttcttttttttttgagatggagtcttgctctgtcgcccaggctggagtgcagtggcgtgatctcagttcactgtagcctccacctcctaggctgaagtgattctcctgcctcagcatcccgagtcgctgggtggcatgcaccaccatgtctggctagtgtttcatatttttattagagaccagggtttcaccatgttggccaggctggtctcaaactcctggtctcttgtgatccacctgcctcagcctcccaaagtgctgggattacaggagtgagccaccacgcctggccctagcctagacttctatacccagcccagctatcattcaaggatgagagtgtaatagacattctcagataggcacggtgctcaaaatgtgtcttccacgcaccctgtcgcaggaagtggctgcaggatgggctccaccagagcagggggagggagccttcagagggctgtgaagggaggtgtctggaggccagctgtgcccacgtgggagctggccgttgagagtagagggtgtgacagcaggtggcgcccgtggtgcagctaggatgctgcttctccaccgcacctgctctgactcatgcctgggacctgggagacggtggcgaggcgctggggggttacaagcagaactgcagagcagcccctgccagcctcgtcacacgccctgactgtggggacctgggtatccttagaatcctctagtccccacccactgatggccctgaatggctcctgtgaagtccccgggaggctgaagacaccttgaccccaggctctgttcagttctcttctcttgagactttcagctgacagggtgaggttgagcccactgtgagattaggcaagacaaaagataatatagcttaggacatgcaaaacaggctgggtcactggctcacgccttgatagcactttgtgggggccaaggagggaggactgcttgaacctaggagtttgagaccagcctgggcaacatagcgagacctcatctctacaaaaaatataaaaaattggctgggcataggggcgcacacctgtagtcctcactacttaggaggctgaggtgggaggatcacttgagcacaggaggtccaggctgcagtgaatcaagattgcaccgctgcactccagcctgggcaagggtgagaccctgtctaaaacaaaaacaacacccccaccaaaaaaagaaaaacaaaaaacaacctatcatcaccaaaactccctatcataggtgaaaagaaaaggcttttccagatgcccagaaaaaacagcagttcccaggctctccctgccaagcacctcacgaaggcaggaccttcagcctgggaggaagcctttgtgtactcagcctcttctgcagcgcactcctgggttgcaggtgctccaacctgctcagcccctttgcttagtgaagccgccctattcctactcagtgcagaagcttggctgcacacacactcacacacacaccccccacacatacccccccacactcacacacacgcacacatacccccacacacacaccccctatacacacccccacatatacatatccccccacacacatacccacacacacacacacctcccacacaccccctatacacacccacacacacccacacactcacccccacacacataccccctacacacatacccccacacacacaccccctatacacacctccacatatacatatccccccacacacataccccccacacacacctccacacacacacatactgcttctctccattacacacacagacacacagagatgcacagatacacacacacacacacacacacacacacacacggcccagccccctgctgctcctccgggtgtggtctctgctgtatccccccagcaccccactgccagtcctggagcccaccactctgctcacttatgagcactctgcactcaactcctgcccacacccagtggacttctgtgccccacacccccgacctcctgaccccccatcctgatcctcctccagcttcccctcaactcagcctctctcgggacactccctctgcacttacctcggaatccccgcccctggctttcctgcacccctcccgcccctgactcccccacgtcctccccaccccccgcacccccacctgggctctgtcatgcctgtagctccctgctcagtgtcctcaactctccaatccacctgctgcctgtgaccttactgggaaggagctgagccatggaggagcccaggggccccccttgtacctgccctgcctccagcatggcccaggagcatccccagcccggtgccaccaggaagccttgctccccaggccccctcggagcccgcacccaagccccctgccaacaggggccacttcgcctccctcccctcccatctcatccttggcaggggcccttgcctcactccccttacagaggaagggggacagaagcccacagcggtctcctaggtgtcctgcaagaaacccgcccacttgctgcggggcgaggccccaggctgcagatcctggcgccacagggtcctgccctggtggtgatgccctcccgacgcatcctccccagagtccacacctggatccccagaacctgcgagtatggaccttctgtggcaaaggggacttagcaggtttgactaacagaaggacccgaggtgggagatggccccggatggccccggatgacccgggggggccctaaattgtggtcacaaggacctcagaagagggagcaggagggtggagacgcgaggacggaggcagagtcgggggaggacggaggggcgctctgctggccttgaaggtgaggagggggcgggggccgcctccggaagctggagaagacaaggaatggatcttcccctggagcccccagaaggagccgccctgtgacccttgaccttcacccggtgggatgcgttttggacacccgtcccccagggctggaaggccatggccgtgctgttcccagctgctgggttggcagtggtttgtcttggcagccctggggagctgacactggtgctctcaccccacatgccctctggccccgctacagggcatctgcaggggcctctgccactatgctcagcagggtctttgaagcctccacactgccaaagccagaggtggcttttcagagctctccactgtggctctcaggccacctggccacacggagtcctctcattccccctcctggagcccctccccaaatcaagctcctcctcctcctcctgcacctgcttccatggggaacgaagccatcctctgcacagccaccactctggacaacagccaaaggccctcggaccagtctcctcctcccccggccccaggcagccacggtgacctcccagaggggcatctgaccacctgccctgcccaacccctccgagacttccagtggccccaggggatgtgccaagcacaggccaagggagctgcccccagggccacaacgcctcttctggcctcggtctcctcctgccaggacagcttcctttctcctgccttggatcttcgggtttctggggagtgtcgtgtcctcggggaggctgtcctctgcctcttggcatgcctgtcctaacttcttgtgacatcaggcctgccccgaatcacctgttcgagccaccccagtgcacagcaggaactggtaaagtgcctgggctgcttctgccttttctccctttccatctcggagggacagcaggcctcacttgccctgtcctcagctccacgtgtgggcagtggccttgtggtcatagacagcatggaatgttcctgaatagcctcagtgacactggtttttcctttttttaaaaaaaaaaaaattgaaccgagccaggcatggtagtgtgaacctgtagtcccagctactcagcaggccgaggtgggggaattgcttggggccaggagttcaagtccagcctgagccacatcatgagaccctatctctaaataaaatttgtttaaaatggaactgaaattcacagaacattaaacacttcacagtgcacactgagcggcattcagtacattcatactgctgtgcggccaccagcactgcctgcttccagaatgccttcttcaccccaaacggaaaggaaagccggcacccattagtcagcattcttcattctcccgccctcagccccaccagtccgcagctgcttttccgtctcatggatttacctgttctggacattttcttttttctttcttgctttttgtctccctccctccctttctctgccttgccttgccttgctttgcctttgcctttgcctttgcctttcttgatggagtcttactctgtcacccaggctggaatgcagtgtcaagatctcagctcaccgcaacctctccctcccgtgtgcaagcgattctcgtgcctcagcctcccgagaagctgggattacaagcacacaccaccacggctggcttttagtagagacagggtttcaccatgttgtccaggctggtctcgaactcttgacatcacgtgatctgcctgcctcggcctcccaaagtgctgggattacaggcatgagccaccgcgcccggcctggacatttcatatacacaaaatcgcagaggacacggcctttgtgtctggcttcttttgctgagcatagtgtcgctgtcgcttgtgtgggaatttctctcctcatggctgagttgtgctaccttacacgtctacactgcattttctggatccattcacctggcaacggatgcttgggttgttcttccctttggctgctgtgaggaagcatctgtctgagtgtctgttttcaactcctttgggtggatacccaggaagacagttgctggaccacagggtaattctatgcttaactttttgaggagccgccaggctgcgtcccacagtgggctccttgctgatattttcaggcactcagctctgcagtctgcactgccagacacctggacccgagtgagtctgaggagcacggtgctttgaggagctgctggctctcccaggggctccttgatggggctcctgttgcctctgcctgtcccggggctgctgctgctggaagctgagactcatcctcattttccatgcaaccacgggcaggaaggagcctgcacgcgacatgccagggtgcgcgcttaccctgggcccctcgtgcaccggaggaagaggcctgcctggctgtggggtagggtggggccagcttctgggctgggcgctctggcttccgggacaccaggcggaatggctaaagcagggagacacaggcccctgtagagctactggggcggtgacagctggacttggatgctggcttcatgaccgtgctccccagcgttcccacctggtgatgtccctcccctggaatctgccggaggcccaggactttctgacccacaggatgccccaggaatgacaccatatgacatctgaggccaggtcacacaaagcctggcagcttggcctggcctggtgaacgtgctctggagggagccagctgccacgggagaatccaactaccccgagaccaccatgctgcagggaagcccacgccagccacatgggaggccagccggccctagctgttccagccacccaactgagggcgggggcgaagaggccatcctggacggtccaccccgtttggccttcagacgactccagccccagctgccacctgattacaactgcagagagaccccaagacagggctgcctggctgagctgggcaacccacaggccaggcgataacggggtgctttaaggcactaagctttggaggagtgttttgttacacggcaatagttaacagggaactgggagtcgatttcaagctcacatggccagtccaccctgagcatgtcccctgggccatagttcagaaagcaggtgcaggtcagggttcagggccagtgtgggcctcaatattgtttcctgcccccgtggaggccgtggtggcatttggagggggtccttggaatccatgcccaaggaagcactgaagctgcctgggaccctcccacacccaggaagggccgtcatcaaggtaggacttgcagggggagggaagggcagctggcttttgagtggaggagggacagctccagagacagcgtggcagctcccagccaccctcgccaccaggaacctcgaggggaggccccctcggcccaagctctggcccctccagctccctactctcctctcccctagcttccttccagggccctctctctttggtctcctgtgattttcttcctgggcccacagtccctccctccctggggggctgccccgcccccggccccgcccgcggacccctggagtaacttaatctcggggttgtggtccatccccagagtggggaggcatccgctcggcccatcgcaccccaaagctgcaggcccttagctccaaccaccgccaggccctccctcccccagccaagaggtcccgagtcccacccaagcactgtaccccggcccggctggccccgcccggcggccggggtcgacccggccagtccttcccccgggcgacgcccacgtgcctgcgcggcttccctggcaccgcggcgaccagcgccccgaggcgcgcggcacccgacaggtggcacctgcgagccccgcccacctcggccgccccgcccacctcggccgccccgccccgcgcgcccacggagcatgctcagagccgcggtcacgcgcccgcccgaaggctcctgtcgggacagggcgccgccccgtgtcggcccccgcagagctcgcggcccccgcctgtccgggcgccgccatggagcgcatcgagggggcgtccgtgggccgctgcgccgcctcaccctacctgcggccgctcacgctgcattaccgccaggtgagcccgcgcccccgcgtcccccgcgcccccgccggcggcccggcccacgacccgcgccccgcccaccatcttccgcgctgccggccccgccccggagccccgcccccgcctcccgccgatctcccgggcggccgcttgtccgcccgccggatcgcgggttcccagacccagtgagcccccaggccggggaggggccgcgggagggacatctgagggggcaccactcatcctttcaaggaagcattgctgggccccatccttcccgcccgcccaatccgaccctcttggcagtggaactccttggttgccctggggatcagggaaggcttcctggaagtggtggctttcatgctaccacttgaaggaggagatagctgggccgaggaggagggagcaaggagcgcagaggccgggcgcagggaggtaggagaaggagctgagtgagaacttgagagagcctctcaaagcaggcttcctccttggggttttttccagggagggcacctccttggagtctccatctgcctaagctcagccttccccacctcctagggtgtcaccttctcccatgccaggccacggcacaagaggctgtattgcctcacttagcaccaggcacatggtaggttcacaaggaatattttgttttgttttgtttttgagacagggtcttgctgtcgcccaggctggagtgcagtggcatggtcacagctcactgcagcctcaacctcctgggctcaagcgatcctcctgcctcagcccccgccccagtagctgggaccacaggtgcacaccaccacacctggctaatgtttaaatttttttgtagagacgacgtctcactgttgcccaggctggtcttgaacttctggcctcaaccgatcctcctgccttggcttcccaaagcatggggattacaggcatgaggcatatgtgttgggtgaaggagctgctgccatccttttcccacatccagtggatcactgagtcccgggccgtcttcctccaagcccagccctgtccagttagggccccaccttttgcttgcatgcccacctgcccccagcagatctcccctctgccagagctccttcatgccattaaggcaaagaccaccttcctggtcacagtcagtccagccccccagcctatcaggtcaggtggtccaggtcgcagtgcctctctgcctgcctgcctccctccctcagggggcatcctgtcccccccatcacatccaggactctgcccctcgccatcctggagaagccctcttggcccccagcctgagagaggccctgtgcccctcactttccctgttgcgggagtcctgttggcgctggaggacaggggatccctctccccaaggcgaagctaagctggtggtgctggcagggggcagctgggatcagtcggggtacagcaggtggagacatggggtcactgcccttttccctgacgttggccatatgggatgcctgcttgtggctgcacagtccccacagggctgggtctcaggcagcaggtgcaggcccaggcaggtgccctctgtggccctggtggcagcactctctccctcactccccgtgaagcctcagggcagcccttgcagcctcagcgggcagcccgccggcacagctctgctgaagggttctggtgaccagagctgagctggttcgggctgtggctgtggtggacacggatgtaggctcgggctgggcggcatctcctcagggccaagggacattgggctggacgctggctgccacccaggggcagctgcagccctcagctttttgctgcgtccagccaggggaggcctgtgatgtcaggcagaccaaaggcaggggacccccgtggctccgaggcgatggggtcttctttgcacccagccctgcccctccctcccaggcctcagcagcctccctaaacctccctgcaccttgacctggctggacctaagggtctgacacgcttttgaccttgagctgagagggtccttgagacctgcatggggtgatgttactcggggggaagcagtggtggggaaggggcatgggcacagcaggcacatggcaggctgtgggcagggggcttccctggagcctgccctggctgggtggtggttcgggggtggctgggtgtcaggcaggcctggggtcgcctcccgggagtggtaccccacggcctctcgggctgcctgacctgcgcgggacgccggccctcccttcccttggaaaccggtactctcctcccaggacgcctttgcctcccggccaagctcagagggcctctgcgcctctgcctgcccagagtcccttccctcacttccgtcacctcctccagaaagtcctcaggaaggcttcttctctcttctgcagtcctggctgcacttctgtgtctctgctgctcagacctcttgtccatttcacagccctgggcagagcccccggtgggggatgagcagctggcctgggcctcagagtggcagatgggctgagcgtgccggagatgggaccccgcgggaccccaggctcagcccccaggatgggagtgcatctcagaatgcatcagttccagcctcccccagcaggcccagcccacacacctgcccaccctgcctcctccgttcactgagtgccacccagggtgcaggggcctgccagggtggtgtgcccagtgtgggggagtgggaaggtggagggtggccacaggagaacgggaccacagggtatgtgggagagtcgaggccagaaactgggggtaggggtgtgtgggggggctgccgagcctggtcaccatcatgacagtcaccgagtcctgcagtgcgatctcctacctggctggggcgccacccttcctcatctgctcctggtgccagcccctcctgccacccttccccatccactcctggtgccggcccctcctgccctcccgtctccacctgttcagtggcccaaggaagcatcagcaggaaaacctgacctctcctctgcctgcagggccctcctgccctgctgtgagggagtcacgcctgccctccccgagcctccatgagccttcctatacttggtgacggtgtacgtctctctgcagccccttgtgctcggtctgtgctgggcagtgtttcatgaggtgcctggacaccttccctgccctttgccctggtcttctgcctcactcgtagggtattaggctgtccttgacctccctgcccctcccaggctgcttgctcctctgcccacgggagctgcagttcctggctcccgtgggcccaggccacgagccgatctccctggttaggagtgggtgcaatgggtctgtggcctcctcggttccccgagcacctccgcccatcctgggacattctaaccgctgacctgccccttctagaatggtgcccagaagtcctgggacttcatgaagacgcatgacaggtgagagcctggcccagcctggccactggggaagccccagactgatgtctacggggacactgggcccagggcgaaggtgccctctcctccctgacgttgctgttccctgcgtgggctccaaaagtcccttctctctgcccggcctctgggtttcctatccctgaggggtcagcctgaggcctgggggctgagtcaggtctttgctcaggccaccgggaccatgatggtgggcaggccctctcagggcagggagaggctgtcctggagcctttgcccctagcatccagggtctgggctggatggcgacgtggctcgaggagtgtggctggtgggcagctgctcagtgagggccaaacgtcctgtcagtcacccggcctcagctgcgagcaccctgacctactcagctgcccgtgtgtccttccctgccccccgcctcccatcctgccagctggaatacagcaggtctgggtcctggccagactgtgaccctggaaagctctggtcccgcctgggcctcagccatcctatctgagcaaggggcctgacctccctgggctgctggcaaggaggtgggatggccacgctgggaacagaaagatgggaggtggggccccacgagggccagtggagtgcttctgtgctgagcccctccccccgtacacagcgtgaccgttctcttattcaactcttctcggaggagcctggtgttggtgaagcagttccggccaggtgaggccagctggggtgggaaggggatctgcagggtcaccttcaggtccctgtggtcctgagggtctgaatacagatgtgggagggggctccaggggaagctgaggccctgggagggggcttggctgtgtgggtgacctggaggtggccaccacgtggctgtgagcacagtctggcttcttcccacgcagctgtgtatgcgggtgaggtggagcgccgcttcccagggtccctagcagctgtagaccaggacgggcctcgggagctacagccagccctgcccggctcagcgggggtgacagttgagctgtgtgccggcctcgtggaccagcctgggctctcgctggaggaagtggcttgcaaggaggcttgggaggagtgtggctaccacttggccccctctgatctgcgccgggtcgccacatactggtgagtgggaccaggccctcaggcctgtggtgtgactcaggagatgggagagagtgagggccccgtccctgggagtgtgcaagcaggatggattcctccttgttttccaacatgggattaggggagggttggaccgaatgcgcctcagctcctaagccaggccagaatctgggctcttggggctctctctgcagcgtctcggccccatgcccccagcctgcggcccccagctgtgtgaggcaggccgggtgacagctgctgctgacaggtgcctctacttcctgtaggattaagaccgggcgctgggggtgggggtgactcacagctctgttctcagagggtggcttaggaatgagggagaagctgtgtcctgggctggagaaggggtggctccagctctcctggggaacaggcactagagcctgcgctttgggacctgacccaccaaactcgaggcaccaactcttgccccgcgagggctgccagctggggtggggttgccttcccaggactagatgttggtatgaagcccatccacttccccagggacgctacgatgggctcctgaccccagctgaggtcttggggaaggaggagggtgtcacagacccccacccccaccagctgagcaccagcctccacagcctcctccagaggccagggcccgctccactgggagaagcaccggaagtctctgcacctgtcagcctggcacatgggccactcagggttgagcctggggccctcccacctcagcagcctcaaggacttcacctgggcacgttcctggctggatgggtggactcccaagttaaaggcagcatttccacgctgggccaggcacggtggctcacgcctgtaatcccagcactttgggaggccgaggcaggcggatcacctgaggtcaggagttcgagaccagcctgaccacatggagaaaccccgcctctgctaaaagtacaaaattagccaggcgtggtggcaggagcctgtaattccagctactcaggagactgaggcaggagaatcgcttgaacccaggaggcggaggttgcggtgagcctgaacccaggaggcggaggttgcggtgagccgagatcgcgccattgcactctagcctgggcaacaagagcgaaactctgtctcaacaaaacagaatttccatgccgaagggtggacttgggtgtgaaggatgggccttggttttctgcaggtgtctaccccgtggtgggccacgcccactgtgcccccagctccccagcccatagtactgagcacagccgggaggcatgggaggggctggagtccccttggtccccctggaggaggtgggcctgggcaggttcctggcagagggaccgcacaggctctcagggcaagtggtcaagcagccctggccgcggtggttctactggtacagcctctgggccacagcctgattgtgagggtgctggggagccaaggagggctctgggaagtaggcatcctgcttagactcgcatcgggaagagcaggccgtggcttcagggatgcaggactggagatgctgctgactaggggtcagggtgtccgtctctgagggcctgatggggggctggactgacagcaaagttcacccaccctgtggcagggcccgtggctccctgtctctgattctggaggtgagccaggcctcttacctgccgctgcaaaggacaaggcccagggaggcagtcagcttggggcgtgatggagtgaagttggaacgtgccctggggtgggggaggcgttgcccagcctggctggcagattcctctcagcccgggccaagggccgggcctgtctccttcacaagccggcggaaaccggggctggaaaccccagacccgccacttccctcagaggcgcagccgcggccgccgccggaaatgggccatcaggaaggggtctgcgggaggtgaggggctagagggcaaggaagcagctgggtaaggtcggtctggggtgagtccccccggaggtggggaggccttgggggtggggcatggaagcccccagttctgtccctgcccctgtatgttgggtacatctcagagggcggcctctaccctgcaggcctccggctggccttggttcatggcacccgacagcccctcctgcggcgagccagggctcccccaccccctggtcatcttcccagatgcccctcagtcccgtttctccccagatccacacctggccctccccctcctgttccagaatgcagcccagcccctctgccatcctgtcctcctagcccgtggtctccctccacacacgccagtccaggctccttcccttggtgcctgacccctcctggctgccagcagcccccttctggccactgcccactgagggagggggcttcctcttacccctccccagcctgggccactgggcctggtactgaggacctcgctgccaccccaccccactctgccatgctacggggggtgggggggcggtcagtgcatgctgttcctagtctgaaacttgtgtcctgtgggtgcctggtggggaacccttgcgggaaggcctggtgggtttgtccctgcttcccagccagcctgtgtccccgggtatgggctggggtctggcatgggcctctgcagctggccacagactgaggggctccaaacagcactgggaacagcctcagggtatctggttgggggctgcagacaggggtggggtcttctgcttggccttgacaggttgcaggcaggttgtcagccggatctgcaatctcatgggggcttggggtcttcccggctcacgaggttatggcagaattcagctcctggtggctggggactgggtcccacctccctgctggctgttggcccttcccagcatggcggttgcttccccttcagggccagcaggactggcctgaatttctccctttctggcgttgaaacaccctctggagggcttcgtgatcgggccatgcccgcctaggatgctctcccttctgatgagctcaagtcaccggttagggtccttaatcacatcgacaacacccaccccacctggcgagtacaacgtgatcagggaagggatgccctgctgcgggaggggccacgggcgtgcacaccaggtgggaatccgggtgggagagggcatcccagagtcctgcctactggagggctggagggagcagagtggagagggtgggttggagggtggtagaagggccagggggccagcggggccagcgtgggtgactcagcagaccctgtctcaacccgtaggtctggagtgggactgactggctccagacagaccatgttctacacagaggtgacagatgcccagcgtagcggtccaggtgggggcctggtggaggagggtgagctcattgaggtggtgcacctgcccctggaaggcgcccaggcctttgcagacgacccggacatccccaagaccctcggcgtcatctttggtgtctcatggttcctcagccaggtggcccccaacctggatctccagtgagactccagggttctagacagaggccagtcttggccactcaccccacaccccgcggaccccaataaaggcttgcatagctccagcttctgcctgctggttctgagctctgtgaccagggccttggagaggactggggaaggggcgggaagcagtgaccctgacctgagatggccctcgggacacggcgagctctcctgtaggaggagtagctggtggcaggccatgcaggtggttgctgtggggctgaggacaggcctggggatgccatgggcagggccaggctgtgcctcctcttggagctgggaggggtggggtccgggactcatggagggtggcatggcaggcctgggggtgggcctgctggtcacggggctgcagcatgagctgtgctcacgagagtggtggctgagccagtcctcaggagttaggatggggtgggcagcactgcaggctgcacgctgcagggaaagtatgttccctgctcctggggcaagtgaggggtccccaccctgactggggctgggctagagccactccacaggagcccggagccaaagctgccctgtgtcgggggccccagtagctgatccgtgcacccccagccttggaagttttccaagggaccttcctcggcctgtggggtatgcagaaatgtctgcaggcttgctccaagaggagcaggtggcggcacagggtggggacacaaggccagtggtcttgacatgggccaggttcctggtgccagcccggtcctggtcccggggcacggcctcagcctgggccgcccagcaccaggctctactggcccctgagcatctctggcctgtatgccctggccttgccttctgacctgtcctgagggtggggctgtgggagatgcgtgcagctcagagctgctccccaggtgcccagaatgcttgtgaggcaggaggggacccagctcgcctggtctgcttcctgggccacaggtgcacagtaagggttctgcaggtgaatgggtgtgttggcactggttgtgggcattcgagggcactgctgggccatcagtctgcggcaggatcgatccgctcctggacatcattaggtccaggctgtggctcccaggaggaaagtagagaaggggacagtgaagtgaagggagcctcagtaccctgcagggtggaaccctgggcagggaggtggagactgaccccctgttgtcatccagcacagtgctggacagcctggcattggaggctgtcctgaggaggctgtgcctcaggggcccacaaaagcagtgccacctgtatgcaaatgctggctgtggcccaggtggggccctgtgggcatcagcaaggccagcgacagggctgccggggaggggctgtcaggtatggggtgtgtgccagggaggggctgccaggtatggggtgtgcgggtcttggccagcctcagcttcactctacccagatgaggccccagcaggacattcacaggacaggagctctgcctgacccacagcagccttgctgtgctgcccttaccagcagcctgcctggtgacaccacgagagtgcgatgggccctccgggttgaccagcagaggcctcccactacctcagagggacctctcgcaggcaccaggtgggtctggcccctgaagcactgaggggacaggtgacagggcacccggacctgggtgtagtccagcccctcactttgctccgcagcccgatggggtgggtcagcaggcagtgctgccgggcctaatggagctggcattgatttcccggcactggagggggggttgtaaccggaaactcccctccccgtctgctatatttagcactgcaggacccagcggaagcacagcttactctggagcctcgccggctctgtccaaacccctggcagcccgtcctcagcctggtccccaggactgccctatgggcccagagcccctggccaggctgagcagctgcacccttgccctctgcatacaagctgggcaccgcccagcgctcagagtgggagccctccaggctgggggacgggtggctctgggaggctggagggtgctgtggtccagtgggccccagaacaatgacgaggtcccttactagaagagaccaggtagcctggtctggtgagggttggggctggagccctggccgccactgatctcagcccctcaccccagcaaggtgcagcagggggcaaatgtgttttgtgaaatatgtatgaggggcgagggttcccactgctgccttctggaaactcaaaccagggtccagctgcctggcatttctggctcaagggctgctgaaattcctgcagggaagggaccccctctccgatgcctcctatgtccccctccttcctaagggcaggtgcggccaccttcctgacctgggtgctctcatggacatcgtgaggtctggctgacccatgcccgtccacgctctggcggccccctatgccagcttctgtatgacttgtctaagtcctctgtccacccccgggctgggggctcctgagggtgtgcaggggcggagtctcccttgttcaccacttggccaagtgcccagcagaggcacccagcaccccctcccccaccatagtggggcagtgggcgcaggtggggatggagccctgggcctttggagccgggcagggggcttctctgtcctggggcttccctctctcgagtacccgagtacctgcccccaggccaaagcacaggagaggtggcatctccacagggagcccctccccccgtaggcggtaatcaccgcccacacaccggaaggcggcaactggaaggctctgaacacagcttggattctcttgtttggtgggggtctctgtgcgggcctcatcctggcttgtgtcttaatccccacgaagcctacccaccaccaagtttggggtgggcactctgagcagagccagctgaggtgggcatggggggctcccacccacccctttagggaccttcagctgagcctgcggcctggatcctggaggagctgctaaacagggatggagcaggcagaccctgcgcatggggtgttcacaggccctgtgcctccaaagctctcttccttcagccctcagccccagcagcatggtggcagtgacttgctccaggctggggggctgcacagccacccagctccgggcacagggcaaatttgcgagaggagctagggggagagaagacagctcagttatcatggggatgggttgaggacccctctggaccatatggggatctttaaccaccaaggtgacccctagctctggaaaggaccgtgctcactggaggagaggaaggtgccattggttttgaccctgtggaggagctgcgaggtcacccagggagagggcaaggaggtgaccgcagaggatggggtgtggaagcctggtgaccagggcagcagtgggaggcctctctcggggtagccttcagggacaggcactgccgacttttgttccccatttcccgcctctcgccccccaagcccagacctgagtttggggggcgagaggcgggaaacggggaatgtggcctgagcatttcctgagggcatggcctggctacctcgacgccagcgccgagctgagcagtctgcaccctggagcatttgttgactggctgcttgaccagcgcgcctcgcagaggggaaggcaggggcgtcggaggggcgcagcgccccctgcagccggcgtggaggcggtaggagcggcgcggagaaggggagattctcggaggaggtggggggcgcgcagtaggggctgggcccggctctggccccagggccgcgccaccccgcgtgggggccgagccctgatcagagtaggaggcggcatctcctctgggactgcgaggagcgcggcggtggcgcactgatgggaggggaccacacggcaacctcggggcgccccacccccggtttctgacacccggcaggagcccaggcggaggaggggaggcagctttgcggcgccggcgcacgcctcgccgactcacgcggaggtgtgagcggggcccccgcggcccgcgctgaccccgaggccccgtgcccccgccgcccgggcgccctggggggcgcgcgccgggccggggcgctggcaggcgacgccctccaccgcctttaaagcctggggcgcccccggacccccccccggccccaccccgcggcgcggccccgccccctcatgcatatgcaggtgcgcgggtgacgaatgggcgagcgagctgtcagtctcgttccgaacttgttggctgcggtgccgggagcgcgggcgcgcagagccgaggccgggacccgctgccttcaccgccgccgccgtcgccgccgggtgggagccgggccgggcagccggagcgcggccgccagcgagccggagctgccgccgcccctgcacgcccgccgcccaggcccgcgcgccgcggcgctgcgctcgaccccgcccgcgccgccgccgccgccgcctctgccgctgccgctgcctctgcgggcgctcggagggcgggcgggcgctgggaggccggcgcggcggctgggagccgggcgcgggcggcggcggcggggccgggcgggcgggtcgcgggggcaatgcgggcgcagggccgggggcgccttccccggcggctgctgctgctgctggcgctctgggtgcaggtgagcggggcggcgggggcggcgggggtcgcggacggggcacaccgggccgcccctaggggccgggcgggcactgcctggggccgccgtggttcggaagccctcgaggctgcgcgcggcggctggggctccgggcgggcgcggctgggtgggggcggggcggcggggcctgttcccccacccctggcgcccggcccgccgaccccggcccgcgcctccctccgctctcccgctgccttatttttaggcggcgcggcccatgggctatttcgagctgcagctgagcgcgctgcggaacgtgaacggggagctgctgagcggcgcctgctgtgacggcgacggccggacaacgcgcgcggggggctgcggccacgacgagtgcgacacgtacgtgcgcgtgtgccttaaggagtaccaggccaaggtgacgcccacggggccctgcagctacggccacggcgccacgcccgtgctgggcggcaactccttctacctgccgccggcgggcgctgcgggggaccgagcgcgggcgcgggcccgggccggcggcgaccaggacccgggcctcgtcgtcatccccttccagttcgcctggccggtacgtgcgctccatccctcgtgctccagcccttccctctctctccgcgccccggccccgcgcgcttcgcgacccccaacacctgcggccgggtctgcgtgcgagccgcgcgcgcccaggcggggcggggccggcagggggcgcgtgctctggggacttggtccgcgcctggccacgtgggcgcgccggggccccggggccaccgggagcggggtcgcggcgggggcggggcggcggcgtcccgcgtgcgcggcggtgtgcggcgtgtgcctgcgtcgccctgcgcgtgtctgtctgggtggggaggcgaggcgaggcgccccggtcccgggcaggccgcggtggcatgtgcgcagcgcgtgctggggctggtctagggcaggccctgactgagccgccccgggcccgtggccagcctgcgcctgccctgcagtttcctggatgcctggggggcacgggcgggcgccgtgggacctaggcccgggagagcctaacgcctaacgcttatgtcggcagaagcccccgatggtgacccaagatcgttcagagacagagatagtggatcctggtgcagtgaccttctgtggcactgccctgtttgtgggtttttttggttttgttattctggaggggcagaagctgagtcggggctgtctggtctcccctggcaggtggccagtcaggcaggagccctggcctgggcgtgctgggaggaggggtggtaggggtccagtgtcactgggaaacaggtactcatcccagtgggctggcaggtgggtagtggtaggtgggcaggcccaggcctcgggcgccttacctcattgcctggagcacggccttgccctggtgcccagaggtccttccctgcttggtcattgtgctgggggcctggaactgggtgagtgcgggaatgagagcaccatgcagacctgtgatcagggagtagatggatctgggagccaggaagtggctccagtcagcaggaggcaccggagtgtgcccacctggtatcctgggccctgaagtgattgtgagttgagggcaatccctgccgagctcacgccagttgggcctgccgtgtgtggctcccagtcctgtgctgtacctttgcagccctggctggcagccttgcctgctgcccccatcctcaccgcttcctgagctcccacccgtggaagctggccacagtctcctctggccatgtcctcaacccgtgagcaccccgccgagtatcccttgaccaggggggccccagagaggggaaagtgtcccccagatggaaaaggcaggggcgggcatgggagggcccaggcagttgtgagaagcccagcccctcgcccccacggcggtgcagcaggcaggtctgagcagggcccgcagcctgtcatctgcacctgggcctgagccagcgtggccccacatcgctacctgaggatgtgttttctgctcgagttggcagcagtgggtgtgggggcagggaggtcttggaggaatgtggcgggctatcgcgtgtccgccctggctcttcgccccgcgggccagccggtcaggtgtgggatgggaccgggtaggcccttgccttccttggagtccgggcactgggtttcggggccagctcacctccctgcctcttgcttccagccggttcctcgaatgccccaggagggggcaggcggcctgtctctgggttgggggccagggcagagtcatagctgcgtgtttgggggcagccctggtctcctgccatgtggcctggctgccgggcgggagctgtgccgtgatgccagcaccctggtatttgcactcgggcggcggcagtccctggccatgctgccctggcttgctgaggtccagctctgtgcggtgagctgaggtgtacttggctgtgatgggaaggcaaggaccgagttcaggctccctgggacctgaggaggggtttcagcctggaggctagggtggcatcctgcccaggcccgtggggcttttgggctccttggagtaaagggaatgagagggccttgtggaagaggagtgggggagtctgggctctgcattcgctccctccaccccctgccccctgagtgactctcccaccttgtggtctctgctgttgacccaggcctggctgggtggccctctgccccctggcctggcttcttgtggccggggtctgtgtgctattagtcatggatctgtgctggtctcgggctcagcttccctcagtgggtgggcccagggtcttgaatgtggagaggtggtggaccacatgccagcaggctgcctggctgcccctcctctcctggctccacccccagacgtccccaggaggccggtgtcagcctgggttggttctggtgcctggcttgtagctggcagggtgaggccacattctcccagctgcgtgtgtgcacgcaccccgggtgctctgtaggcatggcaggtggtgatggaggtttggggaggagtagtgtcatgctgggggcagcagggagctttgctctggggcctggtaggtggcaggcccaggggacacctgctggctgagggaggagcagggtggtggcagttggccgtgacctgggcagccagggccccaccctcagaggtgcagctggaagtcgtgcctgcctggctggcccatctctggagccaggagcccaggagcctgcctgccagcgagggtctttcttgttctgtcttggcatgtgtgtgctgggctccagggcagctgtgcggggtggtgtggctggagcatggtccccgtgacagatctgggcttatgaggagaacgggatgggtgaaggccctgtagatacaggaggtgggcctggggctgaccctgcgtctatcagctcaggaggcctgaggtcctgggccatcagaagggctgagcttttctcacctgtgaaaggggcacactgccgctttttcattgcaggtctcacgaagtcagatggggctgctggactcccagctcgggctctgcttgtgcccccagcccggctcccagacctgtccagttcctccccttcccagccttccctaccctctcctttgccccctagggaggaaggtttttacagagcccaccccctgcatccagccgccctagggctcaaggtgggccaggctgaggtctgtgcctggagctacctaagctgctcgtggcaggtgtgaggttcagcaccactctgcttcctgttttttctgagcttgggctggggatgacagggccctggcctccccaccctaccttcaggggatcctgtctgcacactggggaccacccccctccttcccacaccttcccagtagggaccaggagagctggctggtctggtatggaatgtgggcatctgggttcctgtgttgggtgggcatcggtctgttcctcctgccatggccctggggcccagagccctggggagaactcagggcatgtccgccttgtacattgggggtctggttcaaagctttggtatgggggcagggtggggcattcagtgcccaggcaacacggggaccattggagccagggaggactgcccttggccagggaggattggagagtgggctgggggtttgtcgctggtccctgagggtgggctgaagggtcaaagccgcagcacgataggaaggctgggaggtggaggggcgggttggggagcaggcggcaggcctgggtgggaggggactgctgctctcaggggccctcctgggctgctccatggtgtctttatgaggggagcaagctaggccagtgaaggggtgcttgtggagccaggcttcggcctgagctgctgctggtggtggagtgggggcaggaagacaaggatctgcaatcccaggccccagccacagtcgctatccccagaccccaggcctgagcggggtccctgtccccagaccctaggcctgattggagtccctgtccctagaccccaggcctgagtggggcccctatcctcaggccccaggcctgagctgggtccctgtccccaggtcccaggactgagcagggtccctgtctgcagacctgaggcctaagcaaggtccctgtccccagaccccagatctgagtgaggtcactgtccccagaccacaggcctgagcggagtccctgtcctcaagaccacaggcctgagcggaggccctgtccccagaccacaggcctgagcggagtccctgtccccagaccacaggcctgagcgggattcctatccccacatcccaggcctgagcagggtgtggctggcatcagttgtaccctgggctttgtggcaggtgctagccggccctggctgccaccgtcttcacggtgggggacctgggacctagagggggtgtgctggggagtgggggtacacccaggcaaggccctggctggtctctggtgtggagcatgggtgtgtgtgttcctgcgtgggatgggctttggtctgctcctcctgctgcggccctggggcccagagccctggggatggtgtttgcccccaccccttcttccctgcctcgggtgacaatggtggcagaggcctgggcctctcagaagctcaggtttcaggaaatgtatctgtgcttggagctcctggcgcctgcaccaagcgctgtgctccgtagggggcgggaggctgatgcgggaggccgaggagaagaaaccaagtcggggcgttggtggggcagcaggtctaggaggctgtgttgtgttggcctggaccgtgcagggccctggacctgggggggccgttagcggggcagcagggaggctgtgttggccttgaccgtgcagggccctagacttgggttgcctgagttttgggatgctgtagattggggtacagtgggcagtggggtgccgtggacttagggtgcttggcatttggagtaccctgggccatgaggtgtgctgggccatgcagtgccctgggctgggggtgccctggacctggagtgccctgagctttggggtgcactgggccatggggtgcacaaggctgtggggtgtactggatctagggtgccctgggcaggagggtactctgtactttgggtgccttggacctgaggtgtcctgggctttaaggtgccctggaccttggggtgtgctgggccatgcagtgctttggggctctggggtaccctgggctttggggtgccctggaactggggtgccctgggtcttggagtatgctgggccatgcagtgccctgggctgtgggatactctgggctttggggtgccctggacctggggtaccctgggctttgaggtgccctggcctggggtggaacatctattgtcttgtctgcctgtcctctggcttgtgccactgctgttgcccctgcctggggacaggaggaggggtttagacttagccttgagggttcgggctggggaggaggcaatcagatggtgggagatgaagttgggctgcgggtctgcttgtgcggtgggggtgggtcaggccgggcttgtagggagaggcttagctgggcctgcaggggtgaagcccttcccccttggcctccagagactgggcaggggcatagccctgctaggctggccttgagggagggcctgggttcctctccctgcttgccggggaacctgggcaggtgatgggtctctcacctgtccccagacccccagcccacacatcgcctattgcccctgccagcgccaggcccacatccccacatgtcccagccccgttcctagaagggcaacatgcccgccaacccccgcccaatccaggccctatagtccctcctgtgttctaggggtttggtgttgacaaaaccctgtcccagatcgtggcccgccaggcaggaaggacaggggtgagaggttgctattcgcagaggaggcaactgagtcctggaaggacaggggtgagaggttgctattcgcagaggaggcaactgagtcctggaaggacagggatgagaggttgctattcgcagaggaggcaactgagtcctggaaggacgggggtgagaggttgttattcacagaagaggcaaataagtcctggaggctggcccctagggaagaaggggagctgggagagctggcaggtggggtgaggcaggtaccgccccgtcagccagctcaggttcactctggatgacttcctgccatccaggtgtagggaccccagctggcgggcggtgaggccctctcggcgggcgggcaggcacacgtccctgcgggagcaggtaaccggagccctgggctcaggcgaaggtggcagtaatcttacctgagtggctggcatgaggtttcctgggagtcgagaggaactccctgctggccctgaagcccaggtgtggctgtgccgggagaccgggtggcctggcttttctctgcctgccccgtggccagagctgctctcagacccatgctggccccatcctctgacctcactattgctgcttcctggtcctgctggttcctgtccagcggctacagtgactgttaaagcctggtgggtcccagtcctcactcagacccccaacaacagacctcactcagacccccaacaacagacctcactcagacccccaacaacagacctcactcagacccccaacagacctcactcagacccccaacagacctcactcggacccccaacacccgaacagacctcactcagacccgcaacagtcacccacttcgcttagcctcaggaaggaagtccgtggtggggtctggatctgtggtatgaccccactgtccccgtgggctatgcgttctcagcccctgggccttcttgtgggctctgccatgcagctccttcacttcctcatgccctgcagcctcaatctcaatgccacctgttcaaagcctggcctggccttttttttttttttttgagatggagttttgccctcgttgcccaggctggagtgcaatggtgcgatctcggctcgctgcaacctcggcctcctgggttcaggtgattctcctgcctcagcctccagagtagctgggactacagacacctgccaccatggctggctaatttttatatttttagtagagatgaggattaaccgtgttgaccagactagtctcgaactcctgacctcaggtgatctgcctgcctcagcctcttaaagtgttgggattacaggcgtgagccactgtgacccgttggcctggccttattggaacaacagcccctgccccctgttgctttccccgagccccgctggctataggttgccgtccttggtggcagaggcatgcctgctgtacacttgatgtgaacgaaggaaggaaggaacgaaggaaggagccaaatgccagacgcctgggaagcggctgggtgctccaggtgttaccgggggtggggaagggcttggccaggtgcagctgcgagggtggtgctccaggcagatgggttgataggctggggtgggtgggtgggggtgggcaggagccttgggaaccccaagggtgctctgagctgagagggcgtggacagagtcctggtgggggtgtggatggagccctggggggtgtggatggagctgacgggggtggtttgtggacagagcccttggggggtgtggacacagtcctgggggtggtgtggacagagtcctggggggtgtggatggagccctgggggggtatggatggagcatgttggggggtgtggatggagctctgggggggtatggatggagccctgggggggtgtggatggagcatgttggggggggtggacagagctctggggggggtgtggacggagccctgttggggggtgtggatggagcatgttggggtgtgtggatggagcatgttggggggtgtggatggaactcggggggtgtggatggagctctggggggtatggatggagccctggggggtgtggatggagcatgttggggggtgtggacagagctctgggggggggtgtggacggagcatgttggggtgtgtggatggaactctgggggggtgtggatggagccctgggggggtgtggatggagctctgggggggtgtggatggagcatgttgcggggtgtggatggagccctggggaggtgatggagcctgttggggggtgtggatggaaccccgttgggggatgtggattgagttctttgggggtgtggatggagctctggggggtgtaaacagagctcggcggggggtgtggacggagccttgggaggcatgtggatggaactctggggattgtctggcgcctgtaggcagaggtttgcgggccctggtgacctcagggagccctggagatgggcggggactgggccccgtggcctggcggggccatggcggatgtgggaaaacgggtttaaggggagcttaagaggtgggattgagggtctgttgtcagctcgacgtggctagggagggttctaggagcgggttggggatggccccccacttccatcctgtgctcctacctgggtgagcctcctcgggccgtccccgggtgttctgcaggcaggggctcgggggcggggccggggttgcccagctgtgagtgaggcccagggtcagcagtcatgttgggccctagttgtctgtatttgagggacagtcggaggtgtggggcgggggactgggtgggggtcctggaggctgggctgggtgtggctggtagcacgttggttaggggaggggctggacgtgggagtgcagtcttctgagacatcttgggaggccaggcctgtccttagctggatgaggccgaggcactgggacgtgcgtggggtgggcggcgggtgaggaccagggaagggctggcaggcgtggggttgggccttgctggggaagtgtggttttccccagcttagccaggccttggggctggttggatggggtgtgctgagggatggagtgagcctggcctgcctggacactgcccaacgcagcatccccccggggtgggaagccagcaggccctgaggtgactcagccccagccccctcctctgggccccacctggaaggagccagggctgggctcaggggtcaagagcacaccaggggtagactggggggttcctgggcagtgagggctgagaggctgtggaatgtgggtacccagtgctgggtagtacagggcatgtcccgggggtcccacctgtctgagcatgtctgtgagtgacggtctccgtgggctgcactaggcggagcagggggccagccctgtggtctctttgcttggctgacagcatcgcctgtcgccatggctggggtacaagggccaggtggcccgggggcagagggggcatagtggccatggtctgaggctgtgctgggcagtcccaggacctcttggcctcagtttccccaactgtaccgcaagggcccctcctgccacctgttctgtgtgagggtggaggtaggtgtgggtttgcctgtgtgctgtatgcctgcaggacctgagctccggcctgttggggcctctggctgggcgccctgtacttggccaccccgtgcacttggtggaggccgccagcgtggtgatggggccccacgttctcccccgtggtcacccccagtgaggcaccaaggggcgttccacaggaaacgctcgggtcccggctgcccatggggcccctgtctgtggccactccagccaggctgccctttgcccacctctccccccggtcgctcttcctgtgctccgtgctgacttgagccagctcagggcaggctgggcctctggcaccccaacggtagggagcccaggcccctgagcccgcgtggcctggaggggcagtctccctcccttgagctgggtcatttttgggtctgcagaggatgtggcctgaggatgaggagggtggtgggtccctggctggggaggaagggccagagcctggcagacccaggggcagcgtctgagccctgggccttgtcccaccctgaacgaggcaggcaggtgtggcctcaggtacctgacccgcctccccatgtctgcagcgctcctttaccctcatcgtggaggcctgggactgggacaacgataccaccccgaatggtgagtgagccctgggccaggtggcagctcctctcagcttcagcgtgcctgtggcagggcccagctcctctgtctgcttgggacaaagccttgctttaccctgaggatcatgtgtgctgtttccctttttgctttggctgccaggaagctctgccacgtttgggacttgcagagctgtgcatgcactctcttccccagtcctggctttgcctatgttgttctcctcttgggtgtgctcttttggggcccatggcagtgacttagtggaggggacacccttgagtgtgtctctggctttgtggccccctctgcttgtctgtactggagcatggagccttggtggccctctccctgaggcaggggctctgcagggccctgcaggggtaacgggatgacttccatgggtgaatgcagaagcacccacaggccaagggagcagctcgtgtgaaggtctgggcaggagcgggctggctgtgcagggggagcagccggggctgggctcagatcatggaggctggcaagccactgagaggacacgggctccgcctggcaagctgtggctgccttatggagggtgggctgtggggccaggacacagaccgaggaggagctgccacgtgaatctgggcgtgtcagggtgacttggaccaggggcagtctgggggtgagaggggctctcagaagtggaggcatggggttggccaatgggttggaggagggagagcggggccagggcatcctggctgccagcagagtggaggggctgttttcagggcagggacggcggtgggggtgcccaggtggggagcagcagttgtggggaccccagcggctcagggcaggggtgtttcctgagggggtggcagagagacaggtgggctgagtcccaagcaaggtcgtcagggctcttgacaacgtgagcctggagaggctggggcggccgggacgccccttggggagtgggccagcacagtgtcctcccaggccttggcccgaggcgggagaggtggggtctggaggacccgttcaccttttattgtgcaaaacgtcgagcctgtgcctaagcgcagggaccggcatcacggactttgcataccagcgccagcagctgtggtgcccctggcccctggtctcctggtggcttacttaaagtgaggcttagacagcgggtcacgggacctatgcctgtcttgggggcctgaggggaggcttgtcttaaggtggggacggtagtggtgtttggcacttctgggagcaagtcacagcgcaggagaggggagggcaactgagcaccatgtccgtgctgtcgagggctggacacggcgcaggtgggtgcaggtgttggagcagggctgcaggtgggtgggcacaggtgtgggacgtgagactcacgccctggcagcagccgtgccttctctgtggagcctgtggtctcagcagccctccctgcagggcccctggcccctagccgggccccccgaccctctgcgtttagggtgggagcggggcgcaggcttggtggcgggagggagaggcctctcggggccctgagctttctgtagcagcctggccgggggccctgccctccgtgtgctgctgcctgctgtgccccggccttgcagcagccgcaggcttctgccccgtccccgttgttcctggaggacccctggccgggctggtttctctggcctgtgctgactctgccgcctccccaagaggagctgctgatcgagcgagtgtcgcatgccggcatgatcaacccggaggaccgctggaagagcctgcacttcagcggccacgtggcgcacctggagctgcagatccgcgtgcgctgcgacgagaactactacagcgccacttgcaacaagttctgccggccccgcaacgactttttcggccactacacctgcgaccagtacggcaacaaggcctgcatggacggctggatgggcaaggagtgcaaggaaggtgagggggccgctgggccgcgtggagggcagggagggcctcgggcagggccccgggcacaggccttgcggccaggctggctgcagctgtgcctctcgctcctctctgttcgcagctgtgtgtaaacaagggtgtaatttgctccacgggggatgcaccgtgcctggggagtgcaggtgagtgtgccgccggcccgtctttgccctcccaacctttgccctcacgtcctcactggcacacacagccttgctgtcaggagtcgcccggagctggctggaggttgggcacacagctgtgagagccgggccctgagctcgggaggctccttagtgcagtaggtgcgtgtctgagcatgggatgtgtctgatggcggcagccatgtgaggacagtgaggagagactggggaggctggctggacagtcacgtcaccgaggggcagagacccggaggctgcaagccacccagagatggggcatgggcagaggacacggtaaccctgcccatggggagggggtgggcggcgagcggccggcaagtgacaccagcaggcgaggggcggcagagcagaccagtggtgggagctgaggcctgcaggaccagggacagaggaaggggctgctggcaggtttgtagctgggcaaggtgggtggaagggctgtggtagctgttgagtggggaagcaccagacgggaggctgtgagggggaggccgctgtggggcatgtgggggtggtgggggaggggccagcgggatggggagggggtcagtggaagggggagaggcgcacgggtcctgcagacatcctggggtggagcccaggggtttgtggatggatttgatcaagcaggaagggtgtggagtcagggagaaccccaagctgctgagtagcagagccatggtggcaggaggaatgccacagaggagcaggcggggccggggttagctggatgtggagaggcgatgcctgccctgtccctggagacacccagaaagctcgtgggagaggcctggcctgcgccacgcggggcctgtggggggtggcattcaggcggtgacgggaaagtggggaaggcagagaggagggaggccaaggagcaagtcccggctgccacaggtcagggcggatggatgaggagtcagcaagggcctccacaagggagtgtccggggtcttacagccaagtccagatggtggaggcctctggacccagaccagagtgtgggggatccagccaggggggctggcagctttgccctagagtggagcagagaagtcagcagggcaaccagaggggctggggcccagggtctggggtgggcacgggcttcgagccgtggcgctcactgtgcgtgagcaagctggggagcccgagagaggggcgcgagcgggtggagagacagcaggtggaggtgagcaccgccctccagccagccttggattgcaggggtcccaggacctccctctgtggagtgggtttgcctccatgggacgaggacactggggcacagagagcctactgatttccccagggtcacacagcgtggcgttttggagaggagtcggggagtttgggaaccagctgagttgggagccaaggtggggaggtgggtgacccttccacaggccccacggttgagtggcctggagggtacagtgaggagctttcccggccagtcccagagcggggaggcaagcagggctggggccgcccacccggtcacttgcacacacagggattcccggcaggttgagcgagtcccaagtcagctcagaaagtgcaacaaggtggacctggtctgggcagatgtagatgtagatctacgggagtcggccccactcaccctcgcctggcccagtgtgcatcacacaacctggatggcagtgccaccctccctggatggctgctggctggcagcttgaatgtcacaccaaggctggaggaaggcagcagagaagttggccatccctgccctttacccgcaggaagatgagccggagtctggggggcctggtgggtgggggcagtaggtgagctccgcctgcccctcttgctggccctgtcggggaggcccagctgttgctgacagcctcggctcaggttccagtgcaggacgcccccccaccggatgctgcggagatggccatgccttcctgccgccgcctctccagggccctggggctgctggctggggaaaccaggaggtgggggcctggtgtgggctgccctgcccagggtcgagagcacgcccttgggacccacgaggtctgggctctgagcccggctgtggccgctctctggccgatgacccaaggtgtgtcacagccccgccctgagcctgggtctctgtgtctgtggaggagggattctaggcgggatgtgaggccacccacgcggaccactgtgcatgctgggctggatactggagacacgttcttcccggcctcagtttccccatttgtggcagctgaactgggctgataggccttcggtgctggctgtgtggcttgagggcggctcaggaagggccgtggttctttccttttacaaaaataaagtgtggcgggtgccggtgtggaagtgacgtggcctggatgacattcccgtcctgcaggaccggagagttctaggaagggccccccgggagtcccggcagggcctggatggcagcctgctgagccttggggtcgttgcaggctctctcccctgacggaggcaccctcaagtcaggccatgttctaccctggccacctgccctctcctgggggactcccaagacaggacgttggccgatagcctggggcagggcgagtcctggtggttgtgtcctggggggtgcagctgggggtgcagctggagctcctgcagaatcaggaactaccctgggcagggctggcccaggccagcctgtgggcctcagtagccccatctgtgagatgggtaccttgtgggactttactgggagcgagcgaaatgactgcctttgaggtgggggcgagggcacgtgctgtgcccagggccacatggccgaggcagagccaggagtgctcccctgctgcccgctggcctacccagcccctggtgcctcccggccctggcagcaccttgtgagtccgagccggcattctcatccccggggtcccggcagggccttcctttcctggtgcctgctctcggggcccagctcacgggtgaatcccaaaatagctcagggaggagtgacgggacagctggggctgaccgtcggcagccagcggccgggaatgcccgtgacagtggggctggccggcagggctgcaacccctgcctggctggggctgctccagttcaaaggcctgaggccgcccgccggccctgggtgtggcgtgggtgactgtgcctggctcccctgccaccctttcaggcaccacagctcactgggtcttgcgcccctcctccttcccccaggtgcagctacggctggcaagggaggttctgcgatgagtgtgtcccctaccccggctgcgtgcatggcagttgtgtggagccctggcagtgcaactgtgagaccaactggggcggcctgctctgtgacaaaggtagtggtagggggcggcaggcctaatgctctgccatcgaagtgtgggttgtgggggagcggggggccggcttttcccctgagcatcccacccctgcccccagacctgaactactgtggcagccaccacccctgcaccaacggaggcacgtgcatcaacgccgagcctgaccagtaccgctgcacctgccctgacggctactcgggcaggaactgtgagaagggtacgtggggggctggccacccaaattctggccaggcagggactggttccctggggagccggtcaggccccatccctctggcgtcctgtgtggtgggcccctgacccccagcttgggaacctgtgggcttggggaggagtgcttgtggaaagctgggggcctggctgccagctctgccccctccccgcggttctacagctgagcacgcctgcacctccaacccgtgtgccaacgggggctcttgccatgaggtgccgtccggcttcgaatgccactgcccatcgggctggagcgggcccacctgtgcccttggtgagtgtctgcacgtgagtaggggactcctgcctagtatcagtgggggtctgggagtggggcaactcgctggggatggggtgcagtggtcaagtccacacgtgtggctgcggctggcttggcgaggacaaatggcaggaagacccaggcttgcagcgccacctgcccatggggaccttattcccacggctcacactgccagggccccacctttctccaccctctgcagacatcgatgagtgtgcttcgaacccgtgtgcggccggtggcacctgtgtggaccaggtggacggctttgagtgcatctgccccgagcagtgggtgggggccacctgccagctgggtaagggctccgagcgagtgcatgggaacgtgggccgcgcatgcgggctgcgggggctgctggggctgcgggggctgctggggctgctggggctgctgggctgcgggtgccaggtgcccgtgctgcagggggcaggcagggcccgagccccacggctcccaccttgtctctttcacagacgccaatgagtgtgaagggaagccatgccttaacgctttttcttgcaaaaacctgattggcggctattactgtgattgcatcccgggctggaagggcatcaactgccatatcagtcagtatggggggtgggcgccggcgggtgggccgaggcacatgggaccccgcctctgaccctgctcctctgcccccagacgtcaacgactgtcgcgggcagtgtcagcatgggggcacctgcaaggtgaggcggggccaggagggtgtgtggcgtgggtgctgcggggccgtcagggtgcctgcgggacgctcacctggctggcccgcccaggacctggtgaacgggtaccagtgtgtgtgcccacggggcttcggaggccggcattgcgagctggaacgagacgagtgtgccagcagcccctgccacagcggcggcctctgcgaggacctggccgacggcttccactgccactgcccccagggcttctccgggcctctctgtgaggtgaggtctgcctggtcaccctgccccacctgctgctctgggagctgtagggcaggcctcgtcccctgaccatggggcctgagtgacccaggggtgctgcaggggaagttgtccccaaggcgtcccaggctcagctctccactgggtgccaggtgggcaggcggggctgtcacaggtcaccaggcttggccccctgtggccattgcttgttgtgatgggtttcctggtggcctgggctaggagcccccgggctgctggctgcccaggcctatctgtccatctgtgcactccctcgggactggagggcagggggctctggtgggcagagcacatggggtagggtgggtgcctgatggtggagaggtatacacctgtcataggtgagtcctgggtcggagtgggcatctctctcagggctgatgctctcgcctccctctgaccatctgttggtactggaccccccccacccacctccctaccaccctcggccgcccacgatcctgccctggccttggtgcagaggatgggcctcctgtccagagggcttcttggggcccagggcaggggtctgacctcaggacctgcaagcatggcagtggctggccctggaaaagacccacagtcttggctctgagggtggccaggcagtgtgtgaggggctcaggagctgtccttcctgccagcagcaggggccaaggccacactcctcccgagggacagtgaggaagctgggctgcagtggaggtgggggtgggggcccacaggtatctgcgttcagctaaggcctgggcagtctcaggtgggcaggggtcttgggctctggctggcactgttaggcccagggcggaggggcctgggggtccccagggatctaccttcgtatggacagaggcctggcctgtgttcccggcctgggcctgggcctaggctctcacaggcaccccccaccctgcaggtggatgtcgacctttgtgagccaagcccctgccggaacggcgctcgctgctataacctggagggtgactattactgcgcctgccctgatgactttggtggcaagaactgctccgtgccccgcgagccgtgccctggcggggcctgcagaggtgctgggtgcggcatggggtggtgggggaggtggtggggcaggggcgggcctgactcctgactgtactgcctgccatagtgatcgatggctgcgggtcagacgcggggcctgggatgcctggcacagcagcctccggcgtgtgtggcccccatggacgctgcgtcagccagccagggggcaacttttcctgcatctgtgacagtggctttactggcacctactgccatgagagtgagtggccacgaacggcgggctggtggtggggctgggctggcctgaggccctggctcaccccgctcgcctctgcagacattgacgactgcctgggccagccctgccgcaatgggggcacatgcatcgatgaggtggacgccttccgctgcttctgccccagcggctgggagggcgagctctgcgacaccagtgagtgttccagcacccgcccacacggcctgtgcctccacccctgtgggccccttatcaccctgagatggaccgctgtctgggtgcggcaggccccgtacccagaaaggcctggccagggggtgctgccaccatggggtggagtcccaggctgcccccatgcccgaggccagctcccccggcccgacgctcctcccccgcccctctctgtcctcacctggcccagctccagtgcttcctcccccgggaagccctccctgagcgccggtgaccccccgcccgctgaccggcgtcctcgcccccagatcccaacgactgccttcccgatccctgccacagccgcggccgctgctacgacctggtcaatgacttctactgtgcgtgcgacgacggctggaagggcaagacctgccactcacgtgagtgtccgcaggccctggccgcctggggctgcccccaggaccctggccctggcggtctggggcctgcctgctgagcggcccatgtgccaacaggcgagttccagtgcgatgcctacacctgcagcaacggtggcacctgctacgacagcggcgacaccttccgctgcgcctgcccccccggctggaagggcagcacctgcgccgtcggtgaggagcccccgctgcctctgcgaccgccgggcatatgccctcccaggcaccgctccctcgggcgcgatgggccgaggggtcttttttgagggccacacctgccacctgccccctgccccctgcccccgggtctgtctgccctgtctgggttgggggcgcggtatggagacccagggccagcccagggccaggtgagacgctccctcctcctcctctccttacagccaagaacagcagctgcctgcccaacccctgtgtgaatggtggcacctgcgtgggcagcggggcctccttctcctgcatctgccgggacggctgggagggtcgtacttgcactcacagtgagtgtgggaggggtgtgggcgggggccgctttcctccacccagatgacatccctgcccccgactcgccccccagtcccttctgccagcccctccccctgctgcccctgcccccagcaaaaggcaccctccttgatgaccctccccagccccacagcctgatcacgccaagccagcctggacagtgcctggcacgcttggggggtgggtactgatcccctgcgttctcttctcccaaaccagataccaacgactgcaaccctctgccttggtgagtggcaccctgggggccacagcaggggtgggtgggacttggcataccacggggggccacctgatgcccaccctctgctctgcagctacaatggtggcatctgtgttgacggcgtcaactggttccgctgcgagtgtgcacctggcttcgcggggcctgactgccgcatcagtgagtggccagacagccccagccctgggagcccctcagcccagccgcggtgtcaggagtctggggacatcaacgtccacgtcccttgaagggcagtgtggccacaactacttcctgcctctcttctgagcctcagtttccccacatgtctgtgccctgtggggttcctgctgtataccctgccaagtgattaagtggggagccccagcctgggggaccagtccggggcccagggagctgtgggggttggagcgtgcagcctgacgtgggctcctctgtggccgcagggctgttgtccctgggtgttggcccagctgtctgtccagcaccccttggctggtccgacgcagcagctggggctaatccaggatgggacaggcccactgcagaagcagacggaggagggtgctgttgggccagggtcaggctgggctcaggaaggcctcaggcaggcagcagcttgggctcgggggcaggggctgctcctcattgtcctggggcttgcgcctgtgtgccactggctccccgctgccctaggccatgccggtcctgcggtgggcgttggcctcactgcactgagcagcggtggctctccctgcagacatcgacgagtgccagtcctcgccctgtgcctacggggccacgtgtgtggatgagatcaacgggtatcgctgtagctgcccacccggccgagccggcccccggtgccaggaaggtaggccccgtgtgattgccctgggttggggcgggttggggggcatgggtgacacccagccccgagggccagatgcccactgctgaccctcgagccccttctccccacagtgatcgggttcgggagatcctgctggtcccggggcactccgttcccacacggaagctcctgggtggaagactgcaacagctgccgctgcctggatggccgccgtgactgcagcaaggtgagggcagcccgtgagccgccctgccctacccgaggctggtgcacgctgaccctggccactctgtgagatcaggaggcgggtgctggggtccggatggactgagagccgtctgccctcagggacacccagggaggcgagagctcagccaggccccatgcttcgatgtgcagttgggaaaacaggcctggtctgggtcctgccttgctccgcctgccctttctgatgtcgagcttggcctgcctccctgggagccctgggtagggggtgggctgggccctggggctcacagacttgggcggtgtccctccttggcatggggcccgtgcctgcctgtgggttctcatctgtgtgcctgcatctgaccctcctgtgcgcctgcgcctgaccctcctgtgcgtgcctgcccaggtgtggtgcggatggaagccttgtctgctggccggccagcccgaggccctgagcgcccagtgcccactggggcaaaggtgcctggagaaggccccaggccagtgtctgcgaccaccctgtgaggcctggggggagtgcggcgcagaagagccaccgagcaccccctgcctgccacgctccggccacctggacaataactgtgcccgcctcaccttgcatttcaaccgtgaccacgtgccccaggtgaggggcctggtggcatctgagcttgcagaggccacacgccggcatctgctcgtggcatggcgaaagcctagccccgcagggcagggaggccctggttggctgagcagagtcactcttggtcacagagagtggccctgtggggtcagatgagaggggcattgggcctggtgctgggtggaggtggcagaggaggctgggagagcagccagctgggggtgcctgtttgtccagctgccctgagggcctggactgacggcgccatggctgcctggccccagctcttgggctgcagctccgtgggcagttttgccctggcctaggacccacctttgcctgctgtgtgcttggagctgggcccctgtctcccaggaggggctcagaactggaggagacccactgtaccccgccctgcctctccttcccccactggcctgcaggtggagctgggtccgccctgaggatgggcgggtgggcaccgtcactcctgcctcctggtatagggcacagccgggtgggaagctgcccccccaggcccttggcatccttgctgtgctctcctgggcgggctgtagggtgtgtcccacgtgtacccacagcgccagtccagggatgtaggtgtcaggttcacggccctgccctgcccacgcactgcctgtctctgcccagggcaccacggtgggcgccatttgctccgggatccgctccctgccagccacaagggctgtggcacgggaccgcctgctggtgttgctttgcgaccgggcgtcctcgggggccagtgctgtggaggtggccgtggtgagtgcccagtggggagcagcacctgggtgggccctgggtcccgtactatgcaggtcctggctatgctggacagaggctctggcgaggctagtcctggtgcggaaggactgcgggcaggcctgtctccctgcggcccctcgctgtccatgccgcagacccgtggaactgctccctgggcctggccagcatgagggagatgcagggctgtggtgtggagcccgcttcccctgcagctgcatcctcgcccggtcccctgctctgtttttgtctctgtgtccctacgtcacaggcagcaggagagtccgtgggcttagtctgccctgggaggcctgctttgggactggcacctgccctggacctggggggtgtcagatgtgaatggataccaagggggtcgggtgagactggggtggagacatgcccggagaggggagggaatgttctggaacatggtgggtgggtgtgcagagcagtgggtgtggccatggcacagtgtggctggtggaggccatggccaggcacaggaaggacgtgcagtgttttggtgccctgaggccgcagagggggtgggggacatggatgggtgctgctgggtgatggaagggcagtaggggcaggggaagatgtaagaagtgtgccagcacaggtcagggcgccatcagggatgtggtggaggcaggggcacagccccgggttgctgtggcctcgtgaaggcactaggtttgtggtgcccctggggtgtggcccataggtgggggtgggggctgggaactgacaagaagggatggccatcacggagcaggtgtcagcgaatggggccacacacctccccaactcactgcctggtggcgaggtccccaccgcaggaccccgggctctcctgtgtgcccggacggggacaccctccacccctccacttccccccacccctcactgcctgctggtgaggtccccaccgcaggaccctgggctgtcccgtgcgcccggatggggacatcctccacccctccccttccccccactgctcgctgcctggtggtgaggtccccacacctcaggaccctgggctctcctgtgtgcccggatggggacagcctccacccctccactcctccccccgctactccccactcactgcctggtggtgaagtcgccactgcaggaccccgggctctcgtctcccgtgcgcccaccttgctccagtgtggccagggcctcagtgttgggggcaggctgctgggagcctggagccctcgagccatccccacaatgccgttctttgccgcagtccttcagccctgccagggacctgcctgacagcagcctgatccagggcgcggcccacgccatcgtggccgccatcacccagcgggggaacagctcactgctcctggctgtcaccgaggtcaaggtggagacggttgttacgggcggctcttccacaggtaagcgcgggaggtgggcccctgggaaggcaccaggcaggcaactcaggcattgggcacagagccggccgatcctgccgatcctgccagccaccaggaacacagaagtccctggcacctgctgccccagccgcccagccccacaacctgaccttcccagcccccgtcctgggaccctccccacgagccagcaaccggagggtggggcccggccgcctggcccgcagggccctcccaggcctgggtgtgtggctagtgccccgcaggtgcccaggcctcattgcccaccggctcttctccccggtccccaggtctgctggtgcctgtgctgtgtggtgccttcagcgtgctgtggctggcgtgcgtggtcctgtgcgtgtggtggacacgcaagcgcaggaaagagcgggagaggagccggctgccgcgggaggagagcgccaacaaccagtgggccccgctcaaccccatccgcaaccccattgagcggccggggggccacaaggacgtgctctaccagtgcaagaacttcacgccgccgccgcgcagggcggacgaggcgctgcccgggccggccggccacgcggccgtcagggaggatgaggaggacgaggatctgggccgcggtgaggaggactccctggaggcggagaagttcctctcacacaaattcaccaaagatcctggccgctcgccggggaggccggcccactgggcctcaggccccaaagtggacaaccgcgcggtcaggagcatcaatgaggcccgctacgccggcaaggagtaggggcggctgccagctgggccgggacccagggccctcggtgggagccatgccgtctgccggacccggaggccgaggccatgtgcatagtttctttattttgtgtaaaaaaaccaccaaaaacaaaaaccaaatgtttattttctacgtttctttaaccttgtataaattattcagtaactgtcaggctgaaaacaatggagtattctcggatagttgctatttttgtaaagtttccgtgcgtggcactcgctgtatgaaaggagagagcaaagggtgtctgcgtcgtcaccaaatcgtagcgtttgttaccagaggttgtgcactgtttacagaatcttccttttattcctcactcgggtttctctgtggctccaggccaaagtgccggtgagacccatggctgtgttggtgtggcccatggctgttggtgggacccgtggctgatggtgtggcctgtggctgtcggtgggactcgtggctgtcaatgggacctgtggctgtcggtgggacctacggtggtcggtgggaccctggttattgatgtggccctggctgccggcacggcccgtggctgttgacgcacctgtggttgttagtggggcctgaggtcatcggcgtggcccaaggccggcaggtcaacctcgcgcttgctggccagtccaccctgcctgccgtctgtgcttcctcctgcccagaacgcccgctccagcgatctctccactgtgctttcagaagtgcccttcctgctgcgcagttctcccatcctgggacggcggcagtattgaagctcgtgacaagtgccttcacacagacccctcgcaactgtccacgcgtgccgtggcaccaggcgctgcccacctgccggccccggccgcccctcctcgtgaaagtgcatttttgtaaatgtgtacatattaaaggaagcactctgtatatttgattgaataatgccaccattccggcctcccttgttctttcggtgctgtcccttttgtattgagagtgaggttgggggagagccacgccggcagagaggcttggggcagtggggcacgtgctgggtattggcccacgtggctgtggtggctgtagagggcgagacggttctgttgagtcggggcctgccagggcctcgaatgcgttggcatgccaaggtggtggatgcaggtttggccaaaaccttcctgggaatggggaggggggtgtctaggtgcctggcacccgaccctgactaaaacagctgaaaacagttttataaaatagtataaaattgcttacccacgaatacgtatcaaggtcttaaggaattaacaggtcaaaatttttattcattcatttattcctttgttttgcttggtcattcagaggcaaggtcagcatttgatggaggcaggagagaagcagcccttccacctggccctggagctggttttgcccctcactgcttgagccaactggaacgtggcatggtggcctcagggctgggcatggaaggccgactccaaggctgactccgagccgcctgtcagtgatgtgcaagtctttaccctgctgtgaggggtaggaggtcaactgagtcaaggagcaaagccaagaaccagatctgtacaaaagagaaaaaaaaagtcctgctgacagcctgggagtgaggctgccttgcacaggcagaacaaatgaataaatgaatgaacgaataaaaattttgacctggtaattccttaagacccgctcgttgctgcagaagttactctggatgtctgttgttgagcactgctgctgtggactccaggaagccatgcaaatgagctatggtgtgcactagaggggcggtctccctcactccggctggagtcctcccatcggcttctccattgtattgagccaggtctgcagggacacacagaggagctggtaggagaccctgcttgccatcagttgctcacaagcccaaggcttgtgccctcagggtgggggcaagggttaaacccacctcctgccgtggccccaaggggttggccaggcagttcaggcagaagggcagccactgaggagtcgtgtacaccatgactcgtgtggacctgaagcccatgttcccaccaccaggttggccaaaaagacggcaggctttgagtttccttttaaacggtgtgtacctaacttgcagttccctaggttcctggtagaaccaaatgcaaatcacctttgtcctagacatctgtacacctcatgaatgagttttccaggtcagtgagtagaccacaatcaaaccaagtacacgggaacctggcaccatgatcgaaagccatgagaaatgtgtgcagaggcatccgagtgtactggaattctcagacatggattgtaaaaagcttgctgtgctcaaagatggcttggaaaagctgataggccaaacttcaacctagcaccaagtagaacttctagaaatggaaaaaaaaatacagccttcaaaccaaacactccagaagtagtttggcagccacgcttagacactgctaaagagagaatttgtgaactagaagacaggtgagaagaaatgatccaggctgccccccaggacaagagatagaaaatagcatcagcagctgaggagggggccccaggcaagggcctggcaggggctgtcctgaggcccacaggagcccatcaggcatagggtgagcagtaagtaggtgcggcaggtatagcgggtgtcataggtggggctgggttgcccagttacttctgcaggaagtgtcccacaggcctggccctttctggctgtgccaatgtgttccccagattctggggaagcccctgtaacctccgggagatgcatctggcttggagtctcacaggacgtagtctggcctccatgcccatgtaagggtgtgtggctgttggaggtggaggggtggcactcagggatcattcatgcaccaagtgtgcatgggttgagctgagagcctctgcagttgcctgcgtgtgtccatggtgggcgggcctgccgccccccaccctgagctcgccatccagtgtcctgagcccactgggagttcatggcctccctccaccccatactcagtcataaccccccacttaggggaccttgcaccttttcaggcctggctggtgcctggccatggccagcccatgtggatggcagtgtcaagaggtccaggcccggccagcaggcttcctgcttgctgtctcacgccatgtcagggcagacgatggggctcttcttcatctcagtgctactgcccccatggtgtggtcatgaagccgggctaggttctggcccaaccccctggggtaagcctggcagtccctgccctcagaccctaggccacctccacacctcctgagtgccactcacctgcctcacagagtctgctatgcagaggccagggtccacaagtgagggttaggcctcagggtccatcctgctgccaccaaagccttgttcccttgtgggtgggtgggtgggtgggtgagtggctgcccccagagagggcgctgtgtggtcagcaaatctagcgaagaaaggcaggctccctggcacccccaggctggtgctaggcccctggggcccctctggctgtggctgcaggaaccccggtggtcacccctactctggccgctgggcttgggacctgtgccactcctgtttgcccctcaggacacgcaggcgtgccctgctacccgtcctggctgccaagttcctggagcccgctgtgtcttgcactgccatgaagcgggggcccccaacggccagtctccccgctgcctccactctttgctcttcctgttgacaggtctggggctgtgacctgccgtacagagggagagctcctctgtcactggggcacatgtccccaaaatgagcacctgggcctccccaagcctggtgggcagtgagcttgggggacaccaggctccgaggcatgtgccggcgactggcggggcagggcctgttccccacactttggagctgctcccagctgggcccagaggctacatggctgttggctttgtggctcggatgggaagggtctggatgcagagggaactttgaggtggccactgcagccccggggggtgcctggctgaggcggccctgggcagcaggcgctcactcaggcagagggttacagggagccgtgccaccacccctgccaccactttccaggcagagtgacctgtgcacaaaggccaacctgcaggctagacggcgtgggcggggccatgtgcgcacatgccccggagactcctgcctcttctcattctgcaccgtcagagcagggagcaaagggtcggccctgcctggcctggcccgaggggtgcgtcctgaccgcgctgtctgacccagcctgggaccaagtcatggcaggggcctgctgtgggtgcagagcccctctcaggtggtgaagcagcacctcccgcacccactgctgccagggtcccctgctgcgtccttgctgttcggcccctgggactgcgtctgctggttctgcttggcgacagctctgacagctgcgtctccgaagaaaccaggccccagggtgcagagaggaggctccacaaaggagcctggtccctgggggggccagacccattaacccctgcaggccaggcagcagcagctgggtggtgtgggcctcatggtggccacaggcccaactccagctgtcccaagacccacagggctcaccccttccccatcagacccccagacccagggtcttccaaggagcccctgaggtcagcagggacctgtgaggtctcggatggacagcatctggatgccaggacttgaagacctttatacaaaaggggaaactgaggcccgggaggatgggacctgccctgtgacattcctcatggttccccagccctggtggattcaggggctaggatgtgagtcttggggtggcgttctgagaggagggcagccggcaggaggcatggagccacgggagggcttgctggggacagtggtgtcagtgcggctctgggccagggggccagggcggcagctaggcggcaccgggggcttctcctctgggcagagtggcgctgtggagcacgtgtaggggcagaggcaggggccctaggaagctcgctctaggctagaaggtgtggcctgtgggggtcacctgttctgcagcaatattgttatcctgctgtcgaactggggaccaggaagcgtctgcttgaaagccttctgcggaagaaggaagcccaaatggtgaggaggattctagaagcacggaggggctggaaaaagctgtcgagaggcctctggggctgcagcatccggcatccttgctctgatggaatggccaggtcgcttccttgtccatcacaggtttggggtggcccaagggggcctgaccccgacagctggcaaggacacactcatcatggaggccaggagcccccgaggccacaacagccctgaggggctcggtagccagagataggccctgcctggacccacagcgtgcaggcgcagaggagtggccaggcgcttggctcatcgtcaaagatgctcatttgacgtgatcaaagtgcggcacaaaatggctttccggagctagatccctgaggtcccaaagagcaaccgggcagcagaacagaagaacggcgcgggggttgggggaagggagcgggtgccgagactcacacgagggcctggagccggggacggggagaggagactcgggacacagcctctgagtaccaggagctgcagagggaaagggagggacagacggaggtgagaacattacatgaaagagagcatttctctgagctaagtgaagacccgagccggccaagcgaggggcccaccggctgcaggctgggaacctggcgccacggtaaggcctggggaaacggaaaccttccgaagccacaggcagatgccccgccgagggggaaagagaacggactgtgtggtgagctagtgcggcgagcccctcagaacgagcgcccctgcccactgtggatggtgggatgggggtggggtgcagaccctgcagaaggaaggcaaatgcaccagtcccttgggaaggcgcccggcaaagccactagtttccaatgcaggtgcccttcggtgcagcgacctggagcgccagccgcgagggtcccaggcctaggagggctgcagctgcacagccacgcatggcatggaccaggcaccagacaaggccaccacgggggaggccaccgggctgtggggcctcgcagggcagtgcgcaggttcacggagcaagcacattgccgcagattgctgaaatggggccgctgcactccagcctgggcgaaagagcgagactgcatataaaaaaaaaaaatggttaagagagatattttatgtgtatttatcacaattgaaatttttttaggcaagatgcagtccatacgatacgatctgtgcttgtgcttttttttttttttttttgagacaaggtctcactctgtcacccaggcttgagggcggtggcacggtcatagtccacttcagcctcgtcctcctgggatcaagggatcctcccacctcagcctctggagtagctgggactacaggcacgcaccatcgggcccagctaattttttaaaaacttttctgtagagatgagttctccctatgttgcccaggctagtcttgaattcctgtcctcaagtgatcctcctgccttagctcccaaagttctggaattatcggagtgaaccacggcccccagccccattttaaacattcttaagtgtacagtttagtggcattaagtacatccaattgttgtgcaatcatcatggtttgcctttaaaaatttctttcttttcttttctttttttttttgagacagggtctcactcttgcccaggctggagtgcagtggtgtgatcatggctcgctgcagcctctacctcctaggctcaaaggatcctcctgccccagcctcaacctcccgactctctgacactacaggtgtgtgccaccacacccagctaatttttaattttttgtagagatgggggtcttcctatgttgcccaggctggtctcaaactcctggcctcaagtgattctcctacctcggcctcccaaagtgttgggattacaggcatgagccactgtacctggcctaaaaaaatttcaattgtgataaatacacataaaatatatctcttaaccattttttttttttgatatgcagtctcgctctttcgcccaggctggagtgcagtggccccatctcagctcactgcaagctccgcctcccgggttcacgccattctcctgcctcagcctcccgggtagctgggactacaggcacccgccaccacgcccggctaattttttttttttgtatttttaatagagacggggtttcaccgtgttagccagggtggtgtcgatctcctgaccttatgatccgcccgcctcagcctcccaaagtgctgggattacaggcgtgagccactgcgcccggcctctcttaaccatttttaagtgtataattccacagcgctaagtccattcacattgctgatgacactgggtctccagaagtttttcatctggcaaatctgaaactctgtccccattaaacaccaactccccattcccttctcccggcagcccctggcatccaccattctactgcctgtctctatgagtttgaccggatgcctcgtgtgagtggagtcaagcagtgtttgtctttctgagcctggcttattttgcttgacttcatgttctcaaggttcatccacgctgttgcatatggcagaatttccttccttttaaggcagaagcatagttcctgggatgcacagaccgcactttgctcattcagtcatctgttgatggcccctggctaccgtgcctaatgctgctatgagcatgactgtgcaagcagccctttgagaccctccttttggttttgctgggagtacacccagaagcaaaattgtgggatccattctggggtcattctgcttttaattttttgagaaactgccatacctctgtccaagacgacattcccaccagcagcgcacaaaggttccaatttatccacagccttaacttgttttgttttgttttaataacaaccatcctattgggtgggaggtggtatctcactgtggtttcgatttgcatttctctaatgattaatgatgttgagatgatctgtgttcttttctttttttgagacggcctatttttatattaattgtactatttttcccctttttctgtactcacacttattagagtcttttttatgaaaagaaattttggactagagctgattgtaaatgtttgtagagaagaatttagaacaataactttgaacgataaaacttagattagtcatggttaaaatttgataaaagttcccacagtacaaggaaatgtagttatttttgttacctgcagcattttaagataacaataagaatcatgactgactgtgtcacatgaggactatctggcttttataaattttacgcagtctttaaaatactcacattaataacatcgatgtaaacataggtttagaacaggttttaatataacaaagttatgactgatatttggttttttaaatttacataattttggaacattgatatcaataatatacccataaatgtaattgaaagaaggtctagcatcacttaccatttgacaatgtttcccatacagtttaccacataagtctaatcatgtaattcaaaaaggcttaattcaggattttggtcctggagaaacctgtaaaaaatgtcaaaaggtttaaagcacttgatcaaaacagaatcacaggtcattgaaaaataatagttatttgtttaaccagagtgataattaagacctcaaaggcaatacaaaagttacatggatgtaaaagccttaaccctttcaaagctcagttcttctaagtaatcaaaaaactaataaagacaacacagaaatcatcacgacaaaatgtaaaatcttgtgtgtgtgtgtgatttaggccagttactaaaaaggtaaggaaaaacctcctgtaatgtgtgattgcttctcctcatgggaagcccatttaggtaacctagaaatcaacctcattaagaaagggcatttgtacttaatctgacacaggaagaatgcgtccagggtaatcagtgtacactacattctaggagagtgtaaacaagaaaactagtaacttgaacgggggaatacatggctcttagaaacggcgtgggaagtatcctggttacactgaacaattcagacatattaagaaaagccaaccaggcacagtggctcacactgtaattctaacactttaggaagctgaggtaggaggatcccttgaggccaggagtttgaaactagtctgatcaatatagcaagaccctatctgcacacacacacacacacacacacacacacacacacagaaaaagaaaagccaaatgtgatcaagccactgcactccagcctggtgacaaagtgagaccatgtctgaaaaagaaaggaaacaaaaagaaaagccaacagcacagaatccagttatactagaggaaacattgctttctaaactgtgaagataagcacttaagcatcagaccacaatagcaaagttagaacaggagttgatgaaaagattgaaggagagagttataatcccagccaaacaaaaagatacaccttttcaagggaaaaggaacagaaggcaatgatacatggctgcagatcacatggcaaaagttgaacttctgatatgtaaatttgagaagtttaagaaaagaaacagataagaatcaaaacctcttataattttactaagagcaaatcaagactttaagaaaactttgttctaatacagggaaccaatttttagttttgtagtagtgtatttttaatatcaaaactcaaaccttagaaagattgttataaataattattcaaaattatagctaacttaatcacatacaaaattccttttataaaattttcttttcatgaaccttatcacaatttacacaggccatttaagttatgtgtggactttttgctttgtcctataatcagtcattttcctttaggacaaaaacttcaccatacaagattctttctcatacaaaattattctctctctcttttttaaacttttcttaccaaaaatataacttcatatccgtaagcttctttacatctctccctcctacttgctggcttcttttaattttgtttcatatttttaaaaacctgaaaattagacaaaaattattttttcttaataaataacatatttttatgccttttaaataatttttaaattaaaaacacattttaggcacatttatatacagaatcatatataaattagaatttttaactcttagtaaacttaaatttagtaaaaacctaggaagccagaaatcttgaattgtctgtcacatattagaattttattgatgagaaccatattataattttatttttgagatggagtctcgctctatcacccaggctggagtgcagtggcatgatctcggctcactgcaacctccttctcccaggttcaagtgattctcccacctcagcctcccaaacagctgggactacaggtgtatgccaccatgcccagctaatttttgtatttttgtagtgatggggttttgccatgtcagccaggctggtcttgaactcctgacctcaggtgatctgcccgcctcagcctcccaaagtactgagatttcaggcatgagccaccatgcacagcttatattataatttttagaaacatgtaacataatttttcttagttggaaatggagacatttaatttaagatttcaaacatgaaaagtttatttataggcatttatcccattgacatttacttatttagtaaattgcttttctagaccctcaagataaggtctttggctagattaattataaaaactgagatatttgacaaagtgaatcatcattttataagttattttcctgctaaccatttttacagcctgtgaatattaggtgttcacctaagtaagaacattaaagttaaatatatatggctatttttctgataactcagaagatttagctgtttttattaaaccaacaatatgaaataatttttcttataaaaaattacataaagatcattctgtttctggctgggtttatagttttatagccttcatgctaaaccctgacatcttaaatatttattagctcatataaacctgtctgaccactcaacccaggcaaaaacatatgctgacaattccgaagacatttctatcttttattttaccactaatttcaaacccatcttatttcttagagatttacttaagtcagatgaacttcaaaaatatttgggcttactaatttatgagcactcatttatttataagtcatttggtactacgtagacacaacatataataaatgtacatatttgtaaacacatcaaacacatacacacacacaaatgtcttacagctttcattttagaattttagtcatgagacactaataagaaactcactggtttataaaagatgtttggatccaagttacactttttttttttttttttttttgagacagactctctcgctcttcttgcccaggctggagtgcagtggcacaatcttggctcactgcaacctccacctcccaggttcaagcgaatcttgtgcctcagcctcccgagtagctgggattacaggtacccaccaccacgcccagctaatatttgtatttttagtgaagatggggtttcactaggttggtcaggctggtcttgaactccttacctcaagtgatctacccgccttggccttccaaagtgctgggattacaggtatgagccaccacgcctggccccaagttacatttctgacaaaattgggacatgttcacgtggctaaactttatttgctttaatgagtaatgtaatgaaggctgtgaacccaaattttgggtaaagcagtttccatggcagtttgatttttaataccccttttacattttttttttttttttagttttacatgagtttagggttaaaaattcagtgtctacattttagttagaactggctgaattctgtaagaaaaacaaaatctccaggtagtcttgaactagtaacaccataaacaatgagttttatctggaaagcactagaaaagtcagtagattcaggctgggcatggtggctcacgcctgtaattccagcactttgggaggccaaggtgggcggatcacgaggtcaggagattgagaccaacctggctaacacagtgaaatcccgtctctactaaaaaaatagaaaatattagccaggcatggtggcgggtgcctatagtcccagctactcgggaggctgaggcaggagaacggcgtgaacctgggaggcggagcttacagtgagccgagattgtgccactgcactccagcctgggcaacagagcgagactctgtctcaaaaaaaaaaaaaaaagaaaagaaaagtcagcagattcaacgtattcagaaagaaaagaaaaaaaagagagagaacttagaagactctacatgttaataactctgtagctgcagattggttgcttgagctctgaattttctttgatgttatttgtccatcagtttaaacaagtggacaagaatgggcaatagtatgtagctggctgcagtcccagaaaacctggcatgccttaatgtttgaaaatccaatttttggtcatttcagtgttaaatcattgtctctctttctccctctggttatctaaaaacttgtggggcctcagaagagccgattgtcaattgcttgtgacaaggaatttcctatgggacctctgtgcattgcaaggattgcacctccaacacctccacgagccctctaatcaccgagggttgccaaatcagaatccagctggaaggagcaaatattcctggtctttggagttgactcaggtcaaactctcatagatttttaatagcttctgtcctgctgaggtttacttacagagtcaaacggaaagggggagcacgggcacaacctagccaatcagacacctcacgtgatcatttcttcctagtgtttcagctaggagaaatccccttctcaagaaacagaagtcgcaaggaagaacttcccccttcatcaaggagtcgtagcaactatgtgtgaataaatctcaagaccaccagctatgtgtgaggagagactcactcagtggtctttaaccactggggacccagagggactcaaagggcccatgctggtaccaaggcaccgggtcctggtgatgttttggacaactctgggcagttggcttggagttccctcatggtcgccatgattgttgactaaaggagaaaaaatcaagctttcaaataactaaagttagttttattctgaagtcttactgaggactacagattgaggcctatagcctgggagcagctctgtcaggctgctccaacacagtgtttcagctcactgcttgtgtacagagtgggggcttaatatgcacaagagcacatcaaacatgctcgggagtgacattgaagcagagtcccgtcgaggtctggtggtagagtacatctgcttatagatgacagcggcatcatcacgaaccccttcaggtgttggtcatcttatgtgtaggaagaggcaataattttttttttttttttttagagtcagagtcttgcactgtcatccaggctggagcgcagtgattgattttttttaatttaatcaacaatcatggtgaccatgaggggtctcagagccgattctccagggttgtctgatcatagctcactgtgtaacctcaaactcctgagctcaagtgatcctcctgcctcagactcccaagcagctaggcatgcaccaccacgcccagctacttaaaaaaaattttaaggccaagcactgtggctcatgcctgtaatcccagcacgttgggaggccgaggcaggtggatcacttgaggtcaggagtttgagatcaacctggccagtatggtgaaaccccatctctactaaaaatataaaaattagctgggtgtgatggggcatgcctgtaatcccagctactcaggagactgaggcaggagaatcacttgaacccaagatcgcttgaactgcagaggttgcagtgagccaagatcctgccactgcactccagcctgggtgacagagctagactctctcaaaaataaaaataaaaattttaaaatagagacagggtcttgccatgttgcccaggctggtctcaaacccttggcctcaaatgatcatcccacattggcatcccaaagcactgggattacaggtgtgaggcaccgctcctggcaggggtcatgttatctttgaaggaatgtagtgactcaggcaagagatgtgggggccgtgcgctctgtcctgctttgtcttcaaagcatctttctggagagctacacattgtggaagagtcagggctttgtgaaattatactgcaagcagaaaggagcacacgtggcttcttacatttgctactttgttttgcaaaagtaacacttgtgcattagagaggatttgaaaaggacaaaatacagaaactaagggggaaaaatccatcatcccactactcagaaacaaccacagttaatattttgggatttttgttttgttttctgtccttttattctatttaattttttattgtggtaaaatcacatactataagatgtaccatcctaaccatctttaggtgtgcagttcatgcttcgtagttttcagtttatacacctgacgtctcttttgtcaaatttatccttagtatttcatactaggtgatgcctttgtgggtggtgttttaagatttctcaatttccaattgtttcttgcaagtaaataaaaatacaattgatttatctgggcgtggtggctcacacctataatcccagcactttgggaggctgaggcaggcggattacctgaggtcaggagttcgagacgagcctggccagcatggtgaaaccctgtctctactaaaaatacaaaaattatccgggcatgatggtgggcacctgtaatcccagctacttgggaggctgaggcaggagaatctcttgaacctgggaggcggaggttgcagtgagctgagatcgttccattgcactccagcctgggcgacaagagcaaaaatctgtctccgaaaaaaaaaaaaaaaaaaaaaaaagcggttgatttttgtttaatgctcttatatcccacaaccttgctaaattcccttacttgttctggcttctgtcttttagaaaactgacacgagctctgctaatgatggaggtgttgcctgagtcatccaagccaacctgctgtttcctagacatgaaattgccgggttgcaggacaatgaagcattttgaataagcgctgccaaactacttccaaaaagagctgctgacttctactacagtacgggcattcctgtcttccccatcccgctaggcaggctgtgggatttggggcagagccatggggctgtctgtgaaacagctcccggtcctgcacctggctctgcactacgagcgtcatcctcacggcttttccaggcatcctgtgggcgatttatctgagtgtcaacaaatggaaagagggttctgtgtgagttcctgtcctatagcatggagtgtcatgttaaaggacactttttgtgccgttgtctaaatacaaatggctgcaggcattgaactaatggactttggacagagtcaagcaactccatagtgagggacgaggaggcgacttcccccacctggttctcgccctcctgtcagtccttgctggccagggcccagtccatcgcattctgctcacccacctaacctccgcagctgggcggcctttcatcctgcttgattggaatggtatgaaattgcctctttttcgtcaaaacagccacctgtcagcaattccgtgcagttcaaccaaattattgaagtgcagctgatgctcagtgtcaattttctccgcacgcggttccctggccgagcagcccctcagggcccaagcatgggaaacagaggggccctccttacagcggcctttcctgaccaagtgcatcctaacctgagcagctagaggggcagggagacctcaccttcctcatccttcttcctctcctctggaaatagcagaaccttccagtggctttccaccttattcagagaaaaagcccaagtcctcaaaggtcaccccacggtccagctccccgacctccaccctgccctggctcctgctggctccttgggcggcctccaggtgagtgcacttgcctgctccctcgcgtctgaaagcctctgcctgttgcccagcacccctccctggtcgcgggagtgtctctgtgattcacagccccacggtgcctctcattgctggagctgtttattgtctgtctgcccccagaacccaaggtccagtagggcagagacagactggatttcccctgtcctgtccccaggtgtgacctggtatgttgcagacacccagcagatactgcatgcacgaatggatgaatatcaacgtcaaattacttttcataaaagttcccttttcggctgggcatggcggctcacacctgtaatcccagcactttgggaggccaaggcaggtggatcacctgaggtcagaagttcaagaccagcctggtcaacatagtgaaaccctgtctctactaaaaatacaaaaattagccgggcatggtgggggttgcctgtaatcccagctactcgcaaggctgaggcaggagaatcgcttgaacctatgaggcggaggttgcagtgggctgagattgtgccattgtgctccagcctgggcaacaagagcaaaactttgtctcaaaaaaaaaaaaaaatcccttttcttgtccctgttttgcttgtgcctaagggtgtgtgtaggatactgtttgttgggcaatccaggatttcctacacgggcttcacttcaattttgctgttacatttcaataccaagtgggtttgtttgtttgtttgtttgttttagagatggggtctttctctgtcacccaggctggagtgcagtggcatgatcatggctcactgcagccacgaactcctgggctcaagtgatcctcctgcctcggcctcctgagtagttgggaccacaggtgtgcaccaccgtgcccagtttccaactgtgtgtgtgagaaataagaactcataggtgccctaatacctggattctgacatgtttgaaaagacaggtataaaatgcttcaatcactgctgtccttcagccttgcatattgctgtggagaagctt

SEQ ID NO: 4572 - DNA, 4096 bp, Homo Sapiens
atggatttcctgcttggagtctcaggccccagcgtctggcacaggcaggggcctgcggagctgagggcagtggaccagctgcagggagggcgacctgtatgcggagcgccgttcctgcgacatggaccgcggccagcccagcctggagcctgctgccgcggccccccgagcctcgggccggtgcgtgatcgcgcccgtgcgcgctgtgctccgcctgcgccgccgggtgtgtgtcctacgcaaacggcgcctcctgcagccgggtggggggcccgacgtcgggaccggggcgcccaggccgggctgcagcccccgggcaccgcgcgcggacctggaccagccaaagttcttcaccttcgacagccccgcggagctaccctccaggacgccacgcaagaagcgccggcgcagccgcctggtgctttacccggagacctcgcgcaagtatcggccgcgcgtggagcacaggagccgcgcgcagcgctgccttctgctgctagtcgccatcgtgggcttccaagttctcaacgctatcgagaacctggacgataacgcgcagcgctatgacctcgacgggctggagaaagcgctgcagcgcgcggtgttcggccagcccgctgccgtatcgcgcatcgtggcgctgatgcgggactacctggccacgcatgtgcacagtcgtccgctcctcctggcgctgcacgggcccagtggcgtgggcaagagccacgtgggccgcctgctggcgcgccacttccgctcggtgctggaggacagcgcgctcgtgctgcaataccatgcgcggcaccactgccccgaggcgcgcgccgcacaggactgccgcgaggagctggcgcggcgcgtggccgacgtggtggcgcgggccgaagcggaggagaagaccccactcttggtgctggacgacgtggagctcatgccgcggccgctgctggacgagctgcacggcttcctgcagccgcagcgctcccaccacttccacaacgccatctacgtgctcctcagtggcgcgggtggcgccgaggtcacgcgcttcgtgctgcagaacgcgtcccgcgcgctgcccctgcgccccgacggcttccgcagtgccgaggccgcagcggcgcaggcggaagaagacctgcgcgccagcctgctggctgtgctgtcccgggagcatccgctgtggcgggccgcggccatcgtgccgtttctgctgctggacaagcgggatgtggtcagctgcttccgggacgagatggcgggtgagggcttctttcctgaccaggcccgcgcggagaacctggccgcgcagctcagcttctaccgcgtggctggccgcgagtttgccgtcaccggctgcaagcaggtggtggccacggtgaacctcctgtagtggaggcgcaggacgggacgtttgggttgatggcggcagtaggagggcgaccagggaccttgtgggctggtgcaggcccctgaggtttctagtgaatttgtggctgcccggctggtgggtgcggatcagcttggagctctgcttccaggtccacacccgcctcagagtccggagtctgtccctgggggcggcaggacagcagccacctccctcccaaacttgcccattgccctgctgggcgtcccaggcatggtctggtgcgttctccctgtggccccaagaggtgggttcccatggtacaaggatgatctcagggccaacaattcccggggtcacacagctgggacgtgaccccgcctcttgggggtggtcgcgtgttgctcagtgctgaagtggggttctcattccggcccccctggagatgaccccggaggaggccacagccaaccatgacagtgctggggctctggctgccttctccacccaccccacccctcactcaggtcgtgttttcaggagctcaaggctggagtgtcttgacagtaaggggaggggagcggaggcggaggcgcctcaggcagcctctccccctccttcctggaccccccaaccccgggcccgccagccctggcttgggcttactgggtgaccgagagcccgcggggcaagcgggaggtgcctaggcctctccccatccccctcttctccgcacgtgggacccttagcccgtggccagtcccctggtcaccacgattgcgcgacctccctttccctggggccttttgtgccccgagttccgcccacccgcaccctctgcgcagagcgccctccccacgccagtcgaccccacaccccacactccccacgcgccgcctcccggaagccctcctggacgcctcccgtggatgggcccaccgcgcccacgggggctttaggggaaggtgctttgggcgttttttgcgccatgtctcctcggggccggcggttgcctcgggacggttctcgcctcctcccacagccccggtgtctgggacgcacccggcagccccgctgctgccgccttgtggcgcgcccggcccagccggtggcttctgtggtcgccgggggctgagcgcgcggctgggccctgagtcccccaggccgccccgatcctctgtccccgccgccggccccgctgcagtcccaacccgggcctgcccgggaggagcgcaggggcggcgatgaccagtcccgaaaggggctcagagggcagcgaggaggtttcacgccggtgcggggcgccgtcgaggtgggggcaccgcgaaggtggaggcggggccgcgccggaagccccgagtcgagcgcacacggcgggcgcccctggcaagtgggtctcctccggccccgaggcctgaactcagcccggagaccgcgcccaccagcgccggtgtccccggaggggccccgctagttccctgagcagaggtcctgcggcttcccggagggtgtcctgttctctcccccgcctcgcatccattctcgccctggtggttggtgtctgtggtcgggggcgagggccgtctagtggagacggggattcaggccgcttgaaagtctgggatctctgggcggatggcagcggctccgcggagctcgagctcggcgcgcaggtcctgggcccagggcgggagcgctagcgagagggctgccccgtcctgcccagagggtcctgaggactcccgctgctcctggagtcttggggaggggtccggctccacggggtcggggtgggggctaccaggaaacctttgcctcctggggctgtgcaggaccggctagccagcgctgggaaccagggctgagttcagcccagctctgtccaccccaaccccagggctaggggaaggagctgggagaaggagccccacctctcccaggcgagtatctgtcccaggagcccacacagagggacacccagctctggtctggccttcgtgttggcttcaaggtggtaacagagagagctgcagagtgggggtgtgtttgccagtccctgcatgggtgaatgttggggtgcccactgctccccaggcaggcccccaggactgtcagctccccttcccacagagcacccacctggaggtgtcacctgccggcaagcgtgggccattcatccacctgtcagtcaacaacacccgctgagcatcggcttgtatcaaaaggtccagacctaaggggaaattttatctctttctttctttctttcttttttttttgacacagagttttgctcttgttgcccaggctggagtgcaatgacacgatctcggttcactgcaacctctgcctcctgggttcaagcgattctcctgcctcagcctcccgagtagctgggattacaggcgcccgccatcacgcccgggtaatttttttgtattgttggtagagacggtgattcactatgttggccaggctagtcacgaactcctgacctcgtgatccgcccacctcggcctcccaaagtgctgggattacaggtgtgagccaccgtgcccggcctctttttatttattcctaaaatattaccttgaggccaaattctgcgcttaaggagaatgtgcaccaagtgctggggtgggggctggttataaacgaggccacaaatcatgcttgttaataaattgtgtggttcaaatctgaaaaaaaaaaaaaaaaaaaaaaaaa

SEQ ID NO: 4573 - DNA, 181 bp, Homo Sapiens
  misc_feature (22)..(22): n is a, c, g, or t
  misc_feature (111)..(111): n is a, c, g, or t
  misc_feature (113)..(113): n is a, c, g, or t
  misc_feature (122)..(122): n is a, c, g, or t
ctgccaggagctacggccggangatggcggcggccgcagagttgtcgctactggagaagtccctgggactgagtaaggggagtaaatacagtgctcagggcgagcgacagntnccagttctngagacaaacaatgggtccaagtctaacaggattgactactatagcagctcatctagtca

SEQ ID NO: 4574 - DNA, 4604 bp, Homo Sapiens
ggaacagcttgtccacccgccggccggaccagaagcctttgggtctgaagtgtctgtgagacctcacagaagagcacccctgggctccacttacctgccccctgctccttcagggatggaggcaatggcggccagcacttccctgcctgaccctggagactttgaccggaacgtgccccggatctgtggggtgtgtggagaccgagccactggctttcacttcaatgctatgacctgtgaaggctgcaaaggcttcttcaggcgaagcatgaagcggaaggcactattcacctgccccttcaacggggactgccgcatcaccaaggacaaccgacgccactgccaggcctgccggctcaaacgctgtgtggacatcggcatgatgaaggagttcattctgacagatgaggaagtgcagaggaagcgggagatgatcctgaagcggaaggaggaggaggccttgaaggacagtctgcggcccaagctgtctgaggagcagcagcgcatcattgccatactgctggacgcccaccataagacctacgaccccacctactccgacttctgccagttccggcctccagttcgtgtgaatgatggtggagggagccatccttccaggcccaactccagacacactcccagcttctctggggactcctcctcctcctgctcagatcactgtatcacctcttcagacatgatggactcgtccagcttctccaatctggatctgagtgaagaagattcagatgacccttctgtgaccctagagctgtcccagctctccatgctgccccacctggctgacctggtcagttacagcatccaaaaggtcattggctttgctaagatgataccaggattcagagacctcacctctgaggaccagatcgtactgctgaagtcaagtgccattgaggtcatcatgttgcgctccaatgagtccttcaccatggacgacatgtcctggacctgtggcaaccaagactacaagtaccgcgtcagtgacgtgaccaaagccggacacagcctggagctgattgagcccctcatcaagttccaggtgggactgaagaagctgaacttgcatgaggaggagcatgtcctgctcatggccatctgcatcgtctccccagatcgtcctggggtgcaggacgccgcgctgattgaggccatccaggaccgcctgtccaacacactgcagacgtacatccgctgccgccacccgcccccgggcagccacctgctctatgccaagatgatccagaagctagccgacctgcgcagcctcaatgaggagcactccaagcagtaccgctgcctctccttccagcctgagtgcagcatgaagctaacgccccttgtgctcgaagtgtttggcaatgagatctcctgactaggacagcctgtgcggtgcctgggtggggctgctcctccagggccacgtgccaggcccggggctggcggctactcagcagccctcctcacccgtctggggttcagcccctcctctgccacctcccctatccacccagcccattctctctcctgtccaacctaacccctttcctgcgggcttttccccggtcccttgagacctcagccatgaggagttgctgtttgtttgacaaagaaacccaagtgggggcagagggcagaggctggaggcaggccttgcccagagatgcctccaccgctgcctaagtggctgctgactgatgttgagggaacagacaggagaaatgcatccattcctcagggacagagacacctgcacctccccccactgcaggccccgcttgtccagcgcctagtggggtctccctctcctgccttactcacgataaataatcggcccacagctcccaccccacccccttcagtgcccaccaacatcccattgccctggttatattctcacgggcagtagctgtggtgaggtgggttttcttcccatcactggagcaccaggcacgaacccacctgctgagagacccaaggaggaaaaacagacaaaaacagcctcacagaagaatatgacagctgtccctgtcaccaagctcacagttcctcgccctgggtctaaggggttggttgaggtggaagccctccttccacggatccatgtagcaggactgaattgtccccagtttgcagaaaagcacctgccgacctcgtcctccccctgccagtgccttacctcctgcccaggagagccagccctccctgtcctcctcggatcaccgagagtagccgagagcctgctcccccaccccctccccaggggagagggtctggagaagcagtgagccgcatcttctccatctggcagggtgggatggaggagaagaattttcagaccccagcggctgagtcatgatctccctgccgcctcaatgtggttgcaaggccgctgttcaccacagggctaagagctaggctgccgcaccccagagtgtgggaagggagagcggggcagtctcgggtggctagtcagagagagtgtttgggggttccgtgatgtagggtaaggtgccttcttattctcactccaccacccaaaagtcaaaaggtgcctgtgaggcaggggcggagtgatacaacttcaagtgcatgctctctgcaggtcgagcccagcccagctggtgggaagcgtctgtccgtttactccaaggtgggtctttgtgagagtgagctgtaggtgtgcgggaccggtacagaaaggcgttcttcgaggtggatcacagaggcttcttcagatcaatgcttgagtttggaatcggccgcattccctgagtcaccaggaatgttaaagtcagtgggaacgtgactgccccaactcctggaagctgtgtccttgcacctgcatccgtagttccctgaaaacccagagaggaatcagacttcacactgcaagagccttggtgtccacctggccccatgtctctcagaattcttcaggtggaaaaacatctgaaagccacgttccttactgcagaatagcatatatatcgcttaatcttaaatttattagatatgagttgttttcagactcagactccatttgtattatagtctaatatacagggtagcaggtaccactgatttggagatatttatggggggagaacttacattgtgaaacttctgtacattaattattattgctgttgttattttacaagggtctagggagagacccttgtttgattttagctgcagaactgtattggtccagcttgctcttcagtgggagaaaaacacttgtaagttgctaaacgagtcaatcccctcattcaggaaaactgacagaggagggcgtgactcacccaagccatatataactagctagaagtgggccaggacaggccgggcgcggtggctcacgcctgtaatcccagcagtttgggaggtcgaggtaggtggatcacctgaggtcgggagttcgagaccaacctgaccaacatggagaaaccctgtctctattaaaaatacaaaaaaaaaaaaaaaaaaaaatagccgggcatggtggcgcaagcctgtaatcccagctactcaggaggctgaggcagaagaattgaacccaggaggtggaggttgcagtgagctgagatcgtgccgttactctccaacctggacaacaagagcgaaactccgtcttagaagtggaccaggacaggaccagattttggagtcatggtccggtgtccttttcactacaccatgtttgagctcagacccccactctcattccccaggtggctgacccagtccctgggggaagccctggatttcagaaagagccaagtctggatctgggaccctttccttccttccctggcttgtaactccaccaagcccatcagaaggagaaggaaggagactcacctctgcctcaatgtgaatcagaccctaccccaccacgatgtgccctggctgctgggctctccacctcaggccttggataatgctgttgcctcatctataacatgcatttgtctttgtaatgtcaccaccttcccagctctccctctggccctgcttcttcggggaactcctgaaatatcagttactcagccctgggccccaccacctaggccactcctccaaaggaagtctaggagctgggaggaaaagaaaagaggggaaaatgagtttttatggggctgaacggggagaaaaggtcatcatcgattctactttagaatgagagtgtgaaatagacatttgtaaatgtaaaacttttaaggtatatcattataactgaaggagaaggtgccccaaaatgcaagattttccacaagattcccagagacaggaaaatcctctggctggctaactggaagcatgtaggagaatccaagcgaggtcaacagagaaggcaggaatgtgtggcagatttagtgaaagctagagatatggcagcgaaaggatgtaaacagtgcctgctgaatgatttccaaagagaaaaaaagtttgccagaagtttgtcaagtcaaccaatgtagaaagctttgcttatggtaataaaaatggctcatacttatatagcacttactttgtttgcaagtactgctgtaaataaatgctttatgcaaacc

SEQ ID NO: 4575 - DNA, 331 bp, Homo Sapiens
gatgcagtatttaagctctcaactgtttgtatttggcacattatgtttttacctaatactttaacttgctttctcacatcgtggctgccccaccccaacccccccggcagaaatgattgtcccttttatggatgaggagatggaggcccaggaagtaatctgccaacagccctaccaagcccaggcagccggctggacctccgtgtctgcatgtgaggtcagagatggtcccactgactccgtcctgctggggccactggggacatctgatagggagggatccgtccacagctctgcccagagtgacctctgacatggttcagtctgcaaa

SEQ ID NO: 4576 - DNA, 2214 bp, Homo Sapiens
gttgactggaggcggaggttgcagtgagccgagatcgccccactgcactccagcctggtgactccgtctcaaaaaaaaggggaggggggcgggggagagttgaaagcttaatatgtactttgggggctattaaagcaaacatttcgactaaaggggcgaatcctcgaattgtgcgatcaagcacccgagaggagagttggggggggtcaggaggggtgggggctccagggaacgcccgggggcctgggccggggtctcgcggggcccttccggaaggatcgcggcccccgaaggtgggcgtcccgcggggctccagtctccaggacgttccgggaggctccgcgctctgggaggccggctgcgtggggtccccgcgctgcagccgcagaggccccccagggccgcggttcccggagcgggaaagtcccgcgcgggggcggtggcctcgggggcgggacggggcgggggcgggggcgcgggcggccgagccgaatcccctccaccgggacgccccgctgccgctcgggaagaggcgggccctgcgcgccctgcgctcgccatggcggtttgggcggcgacgtgagcggctccgcggaccccgagcggggccccggccgcgacctgagccgccgccgagcgcccggggccatgcgaccgacgctgctgtggtcgctgctgctgctgctcggagtcttcgccgccgccgccgcggccccgccagaccctctttcccagctgcccgctcctcagcacccgaagattcgcctgtacaacgcagagcaggtcctgagttgggagccagtggccctgagcaatagcacgaggcctgttgtctaccgagtgcagtttaaatacaccgacagtaaatggttcacggccgacatcatgtccataggggtgaattgtacacagatcacagcaacagagtgtgacttcactgccgccagtccctcagcaggcttcccaatggatttcaatgtcactctacgccttcgagctgagctgggagcactccattctgcctgggtgacaatgccttggtttcaacactatcggaatgtgactgtcgggcctccagaaaacattgaggtgaccccaggagaaggctccctcatcatcaggttctcctctccctttgacatcgctgatacctccacggcctttttttgttattatgtccattactgggaaaaaggaggaatccaacaggtcaaaggccctttcagaagcaactccatttcattggataacttaaaaccctccagagtgtactgtttacaagtccaggcacaactgctttggaacaaaagtaacatctttagagtcgggcatttaagcaacatatcttgctacgaaacaatggcagatgcctccactgagcttcagcaagtcatcctgatctccgtgggaacattttcgttgctgtcggtgctggcaggagcctgtttcttcctggtcctgaaatatagaggcctgattaaatactggtttcacactccaccaagcatcccattacagatagaagagtatttaaaagacccaactcagcccatcttagaggccttggacaaggacagctcaccaaaggatgacgtctgggactctgtgtccattatctcgtttccggaaaaggagcaagaagatgttctccaaacgctttgaaccaaagcatgggcctagcccactggctccctggaagagatcaagccatcggagctgctagagttctgtctggactttccagagaccagtattcccttttgctgcctctaaaaggcctgtccctgcagacatgagagacagcaggtctcatgggggtgacaagcttttttttttttttcttaaagaattttcaaaatcaaattccagaatgattttacggagatatcccaggaaaattaaggcttctcttaaacactaaaaaggcatgtaattgcttgttagcaaaatggatatgacacatctctgatacttttttcattattggttgggctgagcagtcagaagacctggtcgtcgtcttgactttggcaaatgagccggagccccttgggcaggtcacacaacctgtcccagcgagggacactgagtggcccttcatgtacatccatggtgtgctggcttaaaatgtaattaatcttgtaaatatactcctagtaatttaagattttgtttttaaactggaaataaaagattgtatagtgcatgtttttt

SEQ ID NO: 4577 - DNA, 531 bp, Homo Sapiens
aagtggtgaacttggattctttattgcttaggatcgcaggtatgcagacctcacagaagatcagctaccctcctgtgagagtctgaaggatactattgccagagctctgcccttctggaatgaagaaatagttccccagatcaaggaggggaaacgtgtactgattgcagcccatggcaacagcctccggggcattgtcaagcatctggagggtatgtatgttttttcagaggcgccctcaaggaaggataaagcagaactgccacaaatcagggacttggtaaaaaggagtctagggaagggctggacatgttaacagctttagagatggtctagattgacttctagtgaaaaaacaccctcaacccttgtttctcaaaatgtgatctgcagaatagtgacagctggaccccctgggagcttgttatacatgcagaacctcaggtctcactccagacctgtttcagaatcggcatctattccccaggtgatttggatacacattaaagattgagaagctcacctctagat

SEQ ID NO: 4578 - DNA, 432 bp, Homo Sapiens; identical to SEQ ID NO: 2205

SEQ ID NO: 4579 - DNA, 120955 bp, Homo Sapiens
aagcttgtggtttacttggacctctgcctcatctttcttcttttgcgcttcagcctgcgcattcgcttcctccactaggctctcatggtgcagaggtttccaagaagatggtgtgaaggccgagatcatttggttatattataaaatagaatgcaaattcacacaagtttttgttttttatttatttatttttttagagatgaggtcttgctatgttgtttagtctggtctcgaactcctggcctcgtgatcctcccaccttgacctcccaaagtgctgggattacaggcctgaggcctgagccactacacccaactgaattcacatttttttttttcttttctgagacggagtctcactctgtcacccagtatggagtgcagtggcgcgactgcggctcactgcaagctccgtctctcgggttcaagtgattctcatgcctcagccccccaagtagctggaattacaggggtgcactaccacacctggctaatttttctgttttagtagagatggggtttcaccatgttgcctggtctcaaactcctgactttaagtgatccacacacctcagcctcccaaagtgctgggattacaggtgtgagcctccacacccggccgaattcacatgaattttaaagtgatgtcttcaaagtggtttcactgtggggatgggcagctttttgttatacatctagaacgttcctcttctgtttctatgaatactcggttggaaagggctgaaaaacggtcttaagagattatctgattcgtttcccagttttattactcacatatcagctgtaatttgagcacgttttctgattgagacaagactcagatggtattaaacattactacaacacatccgggcacggtggctcacgcctgtaatcccagcactttgggaggccgaggcgggcggatcacgaggtcaggagatcgagaccatcctggctaacacggtgaagccctgtctctactaaaaatacaaaaaattaggcgggcatggtggcgggcgcctgtagtcccagctactcgggaggctgaggcaggagaatggcgtgaacccgggaggcggagcttgcagtgagccgagatcgcgccactgcactccagcctgggcgacagagcaagactccatctcaaaaaaaaaaaaaaaaaaaaaaaactacaacactataaattcatatctattataatagtactttgtgcagggccctaccctaagtccttaaccgaacccggaagcgagaagatgacttttgtttgtttttagagatgggcgcctggctctgtcgccagcctggagtgtgggggcgcgatctcgactcacagcagcctccacctcccgagttcaggcgatcttcctgcctcagcccctcgaggagctgggaccaccggcgcgctccatcgcgcccggctaggagctgactttgaatccgggctctgcgcctggccttctgcatctctataagggaagacatctgtgacctcggggcaaaggtcaaattagatcctgggtaggatcctgttcccgctgcccctcgggctggcactgccaggagtactcagagctcaaagctgggatctgcagtcccttacccactcagtgcacgccgcctaaggctttgcgcttcacctttactcacctcgaagccctggacatccgcatctgccctaagacttctcacctcagtagcagaaggaagtcgcgtcagctggccacagcctctctcctaggagaccgtccgggaaaagcgagtcagggtagaccctgaggcccctcagctccggctattttcagatctgtcgctccttcaccctcagcctttcaaacaggccactccaaaaaaaagcccaatcacagccttccttcttctcctggccttccggcactgtccaatcaacgtacgccatctatcggttagtggtgttgcggggccacccttcccgctggtttccctcgtggtgtgtaaaggcagagaggaaaggcgaggggtgttgacgccaggaaggttccatcttggttaagggcaggagtcccttacggacttgtctgaggaaagacaggaaagcgccagcatctccaccttccccggaagcctccctttgccaggcagaaagggtttcccatggggccgcccctggcgccgcgcccggcccacgtacccggggaggccgggccccggaggacgagggaaagcaggccgggcgccgtgagcttcgcggacgtggccgtgtacttctctcccgaggagtgggaatgcctgcggccagcgcagagggccctgtaccgggacgtgatgcgggagaccttcggccacctgggcgcgctgggtgaggccgggccctccggccgggacccccagtccgtcggtgggaagcggtgatcggtgtccccagaggctagtgggctggaagcggggcgccgagggagcagtctcattctcccctcccgtgcgctcagccgagcccattgtttctccttcgcaggattttcagttcccaaacccgcttttatctcgtgggtggaaggagaagtggaggcgtggagcccggaggcccaggatcccgacggtgagagctctgcagctttcagcaggggccaaggacaggaagcaggtacttcatttggataagtagccgtggagaagccccaacccccgcccccaactcactcacatcctcagcgcaggctgccccctccaaagtcccatcctgtctccctgcaccctaccccagaaacgtcctcatctcactgcaaaatggcccgatggaacagcgaaattgggatctatggaaccgattaaccatactggaaaacctcagtttaatgcaaaatagagcttgagcttcctaggaggtcaagggaaaggggaaacctgtaatttgatttttgttgtgggataaaatgaagacagatgttcctcttggatattaatgatgtgaaccacgtgtagtaaataacaccattaattagatttttaaatgaagagaaatgtttttcctgcagccctgataccagaataaatgcttgttcccagaaggtcttcccgtggaacctagtgaggcagtccaagtgtagacttattttttgagacagtctcgctctgttgcccaggctggagtacagtggcatggtctaggctcactgcaacctccgcctcccaggctcaagcaattctcctgcctcagcctcctgagtagctgggattacaggtacccgccatcatgcccagctaatttttgtatttttagtagagacgggctttcaccatcttggccaggctggtcttgaactcctgatctcgtgatccacctgcctctgcctcccaaagtgctgggattacaggcgtaagtcactgtgccccaccagcaagtgtagactttttggtgatggtaagagcagagaggaaaggtgccaaaagaatttgagctggtaccaaagaaggtcattgaatggctgttttgtaaagggatcataaacaggttcaggatggtaagtgccatgaggactgggaccatcactgtgtcctcaaagcctgacacagagttaagcgttcaatattgttcactcctttttctttttttatttttttgagactgagtcttgctgtgtcgcccatgctggagtgcagtggcacgaggttggctcactgcaacctccacctccccagttccagggattctcctgcctcagcctcccaagtagctgggattacaggcgcccaccacctcgcctggctaatttttgtaatttagtacagacaaggtttccccatgttggccaggcaggtctcgaactcctgacctcaggtgatctgcccaccccagcctcccagagtggtgctgggattacaggcatgggccaccacgcccagcatttttttttttttttattagagagttgcccaggctggagtgcagtggcccgatcacagctcactgtcccttgaatttctggcctcaagcgatcctcccacctcagcctcctgaagtgcttggataacaggtgtgagccatggcacccggcccgactcctctttcattatctccagtgctcagggccttcttgtgttaacctgcagaccatggcatttgcttttactccaggctggctttcagggcttcatgaggcccctatcattaagccgtgctccctgggcgccatattctgaaccattcctgctgccttccaaggcaggacatggtcccggaatatgctggttttgactttatcatctttcctgtctcaggatccagggatgagtttctgattttatcatcttccctgtttcaggatccagggatgggaatgaggagaaggaaaggctgaagaagtgtccaaaacaaaaagaggtggcgcatgaagtggctgtcaaggagtggtggcccagcgtcgcctgcccagagttctgcaaccctaggcagagccccatgaatccctggctcaaggacactctgacccgaagactgccccactcttgcccagactgtggccgcaacttcagctacccttccctcctggccagccaccagcgggtccactccggggagcggcccttctcctgcggccagtgtcaggcgcgtttctcccagcgcaggtacctgctccagcatcagttcatccacaccggcgagaagccctacccctgccccgactgcgggcgccgcttccgccagaggggttccctggctatccacaggcgggctcacaccggggagaagccttacgcgtgctcagactgcaagagtcgcttcacttacccctacctgctggccatccaccagcgcaagcacacgggcgagaagccctacagctgccccgattgcagcctccgtttcgcctacacctccctgctggccatccacaggcgcatacacaccggcgagaagccctacccctgtcctgactgcggccgccgcttcacctattcttccctcctcctcagtcaccggcgcattcactccgacagccggcccttcccctgcgtggagtgtgggaaaggcttcaagcgcaagaccgccctggaagcccatcggtggatccaccgctcctgcagcgagaggcgcgcgtggcagcaggccgtggtggggcgttcagagcccatccctgttttgggaggcaaggatcccccagttcacttccggcactttccagatatatttcaagagtgtgggtgatggcgttcacacaaactggtcagcgtttccctggagaggaagaggcaaggtttgtgtatttgggggataaggaaaggaagtgggcgtttgaggaaaacaaagttctgccttaggtaaaaagcagaggtaggggcacagagggctgtggggaggaggcaggaatctgaaaaggtgcctgggggttgaccccattttctgaagctccagcacacagggccccgtgttcacgtcccatccttcactgaaaaccattcacctaactggcttttccttcatgattgttctctcccttgtagctctctgctttttggcctgtatctctcctactcctctgagatggggtcccctacattccagtgcctattaaaggagcctgcacccactctggaccccccagaatagaggggatacctcaggcctgtccctcggctggtggggggggcggagctcatcccaggattcttttcttttttttgagatggagtcatgctctgtcgcccaggctggagtgcagtggcgtgatctcggctcactgcaacctctgcctcctgggttcaagccattctctgcctcagccttcccattagctgggattacaggcatgcgccaccaggcccagctaatttttgtgctgttagtagagacggggttccaccatcttggccaggctggtcttgaattcctgacctcgtgatccacccgcctcggcgtctcaaagtgctgggattacaagcgtgagccaccgacccctgccgaggattctgccttttaccaatgcaggtgaaacatctggcaaggagacacctggagtgtaggtgttccttggtcttgaagacctagaggtggccatagagaggacagtggcctcaggtggggaactccccccccactctcattctgcaagtgcacaaactatcaaacatagcggactctggaactgggccaactcttcactgtatgcattagtgattgcagtgtttttttcttcttcagatatttgcatgttccctggattttgtattttttgataaagatatattcttgggccacagtagctggagatataatgccggaggattcttttttttttttttttttttgagacagagtctgtctctattgcctgggctggagtgcagtggcccaagctacgctcactgcaagctccacctcctgggttcacaccattctcctgcttcagtctcccgagtagctggaattacaagcacccgccaccacgcccaactaatattttgtatttttagtagagacgggggtttcaccgtgttagccaggatggtctcgatctcctgacttcgtgatcctcccgcctcggcctcccaaagtgctgggattacaggcgtgagccactgcacccagcctctttttttttttgagatggagtttcgctcttgttgcccaggctagagtgcaatggcatgatcttggctcactgcaacctccgcctcctaggttcaagcgattctcctgccccagcctcttgagtagctgggattacaggcacccacgaccatgcctggctaattgcatttttactagagacaggtttcaccatgttggccaggctggtctccaattcctgacctcaggtgatccacccgacttggcctcccaaagttctgggattacattttttttttaaagaaagaataaattaattgtgattaaagttgaaatcaaggcatagtctttccagtctaatttttactgtaatgcttgtatgtcaacagttatgaaggccaggcgcggtggctcacgcctgtaatcctagcagtttgggaggctgaggagggtggatcacttaaggtcaagagttcaagaccagcctggccaatatggtgaaaccccatctctactaaaaataccaaaaaaaaaaaaaaaaacggccaggcacgttggctcacacctgtaatcccagcactttgggaagccgaggcgggcagatcacgaggtcagaagatcgagaccatcctggctaacatggtgaaaccccgtctgtactaaaaatacaaaaaaattagccaggagtggtggcaggtgcctgtagtcccagctacttgggaggctgaggcaggagaatggcgtgaacccgggaggcggagcttgcagtgagccgagactgcgccactgcactccagcctgggtgacagagcgagactccgtctcaaaaaaaaaaaaaaaaaattagccaggcctggtggcgtgcacctgtaatcccagcttcttgggaggctgaggcagaagaatggcttgaacccaggaggtggaggttgcagtgagccaacatagcgccactgcactccagcctgggcaacagagcaagactctatctcaaaaaaaaaaaaaaaaaaaggcctggtgtggtggctcacgcctgtaatcccagcactttgggaggctgaggtgggtggatcacgaggtcaggagatcaagaccatcctggctcacacagtgaaaccccatctctactaaaaatacaaaaaattatccgggcatggtggcgggcgtctgtagtcccagctactggggaggctgaggcaggagaatggcatgaacccgggaggcggagcttgcagtgagctgagatcgcgccactgcactccagcctgggcgacaaagtgagactccagtctcaaaaaacaaaacaaaacaaaaaacaacagttaagagagttctttctggcccatttagatctgctagccctacttttgaagaggaaacttttgaaggaatgaacaaaagaggtaggtgggactaagcatttctgcattccaggactggtggtcagtgactcaaatatctctttgaaaagactgcttctttgaatccttgggttccaagataattaatgggaactggtgccgggcacggtggctcacacctgtgatcccagcactgtgggaggctgaggctggttaatcacttgaggtcaggagtttgagaccagctgggcaatatagtgaaaccccatctctaccaaaaaattagccaggcgtggtggcacatgcctgtagtcccagctactcaggaggctaaggcaagaggatcacttgagcctgggagacagaggttgcagtaagctgagatggctccattgcactccagcctgggctacaaagcaggactctgtctcaaaacaaaaacagatacaaaaactgggaacggggtgttatctttacttcaccacatagcctctcctgaattggtggacctggattcctagcttggctcagtccccactggctgtgtggcctttagcatcacctagattctacaaataacatttttctctatttgttttacacatgtcaatctgcctatccatccctctatccattcatttatccattttattaatgtatttcaaagtaagttgcagacatcattacatttcacttctaaacacttcagcatacagctgagttttatgcaagaaacttaagctctcagctgggtacagtggctcacacctgtaatcccagcactttgggaggctgaggcaggaggattgcatgagattgggagtttgagacgagcctggaaaacagcaagacctcatttctactaaaaattttaaaaattagccgagcatggtgggggagggtgaagaaggaggatagcttgagcccaggagtttgaggctatagtgagctatgatggcgccacttcagtctgagtaacagcaagacactattaaaaaaaaaaaagagccaggcgcagtggctcacacctgtaatcccagcactttggtaggccaaggtgggcagatcacctgaggtcaggagtttgagaccagcctgacgaacatggagaaaccctgtctctactaaaaaaaaagaaatacaaaattagccaggcatggtggcacatgcctgtaatcacagctactcgggaggctgaggcaggagaatcgtttgaccccaggaggcggaggttgcagtgagccaagatcgtgccattgcactccagcctgggcaacaagagtggaactctgtttcaaaaaagaaagaaagaaattcagctcccacttaaagttcagttgtactctgttattgacaagtaaagtcgattgaagcccagtcatctcctgtatgttgtgtgacttctcataattatctgatcaagagtcttgaagaaacatttacaatttgatgggcaataaaataatttgaaagcaagagcattttgttgttcttgttatttcttgagacagggtctcactatagcctaggctggaatgcagtggcacagtcacggctcactgcagcctcgacctcctgggctcaggtgtttctcgttctcatctcagcctcttgagtaactgggactacaggcatatgccactatgcccagctaatttttgtattttttgtacagatggggttttgcccaggctggtcttgaactcatgggctcaagtgatctgtctatctgagcctcccaaagtggtaggattacaggtgttagccactgtgcccggccaatttttgtatttttataatgagtggcaggaaaaacaactcatcagctacacggaacagttttagtcttacttgaaagtttgtttcaggcctggcgctatggctcatacctgtaatcccagcactttgggaggccgaggacggtggatcacttgaagccaggagtttgagaccagcctggccaacatggcaaaaccccatctctactaaaaatacaaaaattagcaggttgtgctgttttcagctacttgggaggctgaggcacgagaattgcttgaactcgggaggcagaggttgcagtgagccgagattgtaccactgcactccagccttggccacagagtgagactctgtcttaaaaaaaaaaaaaaaccacaggccgggtacagtgtgcagtggctcatgtctgtaattccagcactttgggaggccaaggcaggcggatcacgaggtcaggagatcaagagcatcctggccaacatggtgaaaccctgtctctgctaaaaatacaaaaactgggtgtggtgatgcgtgcctgtaatcccagctactcaggaggctgaggcaagagaatcgcttgaaccagggagttggaggttgcagtgagccaagatcccactactgcactccagcctggcgacagagcgagactccatctaaaaaaaaaaaaaaaaaagtttctttcaatctgtttagttaatatttttattgttcagcttcatcttcttaagtcttctgcatacttagttcaaagagaagtgatttacaacataggatctgaagaaacaaaagtatttttggttcaagttgctactctgtttaaaaggagaatccaaatagccactcacctgtagtcttagctactcaggaggtggaagtgggagcatagatcacttgagcccaagagttccaggctgcagtgagctttgatcttgccactgcaccccaacctgggtgacagagtgagactctgtttcaaaatgacaataataggctgggcatggtggtccacacctgtaatcctagcactttgggaggctgaggtgggaggatcacttgagcccaggagttccagaccagcctgggtatcatggagagaccccatctctacaaaaacgaaaattagccaggcatggtgttgcacacttctagttccaacgacttgaaggctgaggtgggaggatcacctgaacccagggaggttgaggctgcagtgagctgtgatcataccactgcactccagcctgtgtgacagagtgagaacctgtctcaataataatgataattaataataataatcataatagaaggagaatcaaaataaaacatgcagatggtcaacaggtacatgaaaaaatgctcaacaccactaatcatcagggaaatgcaaatcagaactacaatgaagccggcctggtggctcacgcctataatcccagcagcttaggaggccgaggtgggcggatcacctgaggtcaggagtttgagatcagccttcccaacatggtgaaactccatctctactaaaaatacaaaaattagctgggtggctgggcgcggtggctcacgcctgtaatcccagcactttgggaggccgaggtgggtggatcatgaggtcaggagatcgagatcatcctggctaacacaatgaaaccccatctcttctaaaaatacaaaaaattagccggcgtggtggcgggcacctgtagtgccagctactccagaggctgaggcgggagaatggcgttagcccgggaagcggagcttgcagtgagccaagatcgcgccactgcactccagcctgggcaacagagcgagactccatctcaaacaaacaaaaaaattagctgggcatggtggtgcacgtatgtaatcccagctactcaggaggctgaggcaggagaatcggttgaacccaggagggggaggttgcagtgagctgaggttgcgccactgcactccagcctaggctgcagagcgagactgactcaaaaacaaaaaagcacacaatgagatattatcgtaccttagttagaatggctgttattaagaagacaaaacatgacaggtattggcaaggatgctaagagaaggcaactcttgactgggcgcagtggctcacgcctgtaatcccagcattttgggaggctgaggtgggtggatcacctgaggtcgggagttcaagatcagcctgaccaacatggagaaacctcatctctactaaaaatgcaaaattagtcaggagtggtggcacgcgcctgtaatcccagctacttgggaggctgaggcaggagaatcgcttgaaccctggtggcagaagttgtggtgagccaagattgtgccattgcactccagcctgggcaacaagagtgaaactccttctccaaaaaaaaaaagaaaaaaaaagagaagggaactcctacacactgttggtgggaacgtaagttagtacagccactactgaaaacaatatggagatgtctgaaaaaaacaaaaacagaactaccatgtgggctgggcatggtgactcacacctgtaatcccagcactttgggaggccaaggctggtcgatcaccagaggtcagaagttcacaatagcctagccaacatggcaaaaccccttctctactaaaaatacaaaatttagctgggtgtgatggagggtgcctgtaatcccagctacttgtgaggctgaggcaggaaaatcacttgaacctgggaggcagaggctgcaatgagccgagaccagggcattgcactccaacctagacaacaaaagcaaaactccgtctcaaaaaaaaaaaaaaagaactaccatgtgatccagcaatcccactacctggaatttatccaaaggaaaagaaatcagtatataaaaaagataacctgcatctccgtgtttactgtagagccgtgtttacaatagcaaagatatggaatcaacctaagtgttgatcaggggacaaatgaataaagaaaatatgatatatatacacagtggacttaagccataaaaaatgaaatcatgtttacagcatggatggaactggaggtcattatgttaagtgaataagccagacacagaaaggcaaatatcacatgtcctcacttacatgtgggagctagaaaagttgatctcatggaggtagagagtagaatgataccagagattggaagggtgtacgtgggtgggagaggtggatgaagagaagttgggtaatgggtacaaacatacacttaggaagaagggataacttgtaatgttcaatagcagagtagggtgactgtagttaacaaagtactgtaaatttccatagctagaagagaggacttgaaattttcccaacacatagaaatgttaaatactcaaagtgattgataccttaaatatcctgacttgattattgtacattctatgtatgaagaaaagcaaaatatcacatgaactccataaatatgtaaaaattttgtgtatcaatatattttttgttttgtttgttttttttttttttagatggagtcttgctctgtcacacaggctggagtgcaatggtgtgatcttggctcactgcaacctctgcctcctgagttcaagccattcttgtgcctcagcctcctgagtagctgggactacaggcgtccgactccacacccagctaatttttgtatttttagtacagacggggttttgccatgttggccaggctggtctcgaactcctgacctcaggtgatcctcccgccttggcctcccaaagtgttgggattacaggcacaagccactgtgcccagcccaatttttttttctttttgagacggggtctcactctgtcacgcaggttgaagtgcagtggcatgatcttgctcactgcaacctctgcttcctgggttcaaggaattcttgtgcctcagcctcctgagtagctgggactacaggtgtgcaccaccagacctggccaatttttgtatttttagtagagatggagtttcagcatgttgcccatgctggtttctaacttctggcctaaagcaatctgcccacctcagcctcccaaagtgctgagattacaggtgtgagcaactgggctgggcctaaattaaatattttcaaaatttaaaaaatactcatttctaaggatatatttttccttatataatttctacagtattcaccacatggagtgcagtgaggcagttccagaactcaaggtaataatgtaagcatattaataatatttaattattaacaattaataattaatcaattaataacatatgcatatgagatcagcaggagtcacactaaaagccaaaaagcatttcaggtgaaaaacagcaagggtaggccagaaaacacaaagaaatcttgactgaaaagtcagcaataaaaaacactattgaataaaaaggaaggctcgatatactagggctggcaggggagccaagcaagtagatccagagccagaatgacagcagggacctggtaggccttgcttgttatctccagcaaccagccccacgcttagcaaacagtattctgcatcctgtatgattgcaggtatattccaaatgtggggatgaaggcaactagtatttacagtccaatgccaccagccatgaggatgacccatcttggctgaaaaataaagaccttaaatctaggaagcggaagatacaacccaggacagcaggaaggggagacccggtatgagaagaactgaggcccaacccagtttagagaggagactgaaggctaaaggaggaaggtttcccaggaaaaaaaaaattaggatttgaaagttgatgctatctttgataatttggaacaacgtaaataagtagaaatggcagggccgggcgccgtggctcacgcctgtaatcccagcactttgggaggctgaggcgggaggatcacctgaggtcgggagttcgagaccagcctgacttaatatggagaaaccccgtctctactaaaaatacaaaattagacgggcatggtggctcatgcctgtaatcccagctacttgggaggctgaggcaggagaatcgcttgaacctgggaggcgaaggttgcggtgagcctagatagcgccattgcactccagcctgggcaagccgagatagcgccattgcactccagcctgggcaacaagagtaaaactccttctcaaagaaaaagtagaaatggctgggaaccgtggcgcatgcctgtaatcacagcactttgggaggccgaggcaggagaattgcttgaggccaggagttccagaccagcctgggcaacatagcaagaccctgtctctgttttaaaatttaaaaattagccaagcattgggtgtgcgcctgtggtcccagctactcgggaggctgaggtgagaagatcgcttcagcccgggaggtcgagtctgcagtgagctaggatcgcactgctgggccacagagcaagaccctgtctcaaaacaaacaaaaaataaattcatgtatgttagcaacaattactatttaatttaaaacttccccattccgattccatcctcaccaagcacgttccttcgcctgcagcttcggtctagagcctgagcgagccgagctgcggatgccaggggctgggtggactccgcagctaagctactgtaaaacacgcacctgcttctaccgcgggtgtacacatggtttgccagggtgtgcgcgtcttcccaaggggtctggggaccaaattccagctcccgccatcgggaggcacggtaagagaccgtaggggacacaatcccgagcaccgcagatgccgaggtctccgctgcgctccagtctgtcaacagaggcttcaggaccgcggggtcccttcaaatgccccgccagtcccaggccaatcaccgcgcagcttcttccgggatcgtcgccaatcatcggccgttgcgtattgcgggtacagaggggtaagtgaagcttcgggcccttacatctttcttgaaggcaagaagcctctcctctacttcccagacaccccgcctcccccactagaaaaagcagccgaagcggctttatttaagggcaagtgggacgatgaggccagagaagtcagaaaggctccatatttgatatggtcaaataatggcgcccttaagagcagcctgtgacaattgaagggtggtcgccatattttcagaaggcaccttccgggtcccttaacccgggtgtctatgtccaagcggccatgaagtgaataaacactgaggaattatatttgtccctatcagaatcctcgaatccctagcagccagtccctgctacttcggttgcctcggctgcgttcggacgccacggctgggcggggccgcccttcctgtggacaacgacagctgaggccgggagcggggaggcggcggctccagggacctggcggccgccgatcggggctgcgaggccccatggcgccgcccccagccccgctcctggcgccgaggcccggggagacccggcctggttgcaggaagcccgggactgtgagcttcgcggacgtggccgtgtacttctccccggaggagtggggctgtctgcggcccgcgcagagggctctgtaccgggacgtgatgcaggagacctacggccacctgggcgcgctcggtgagagccccgggtccgagccccctcctccttcaccgggttcacaggggagatgatgtagaagggccgagaggactgtgagccctaatcccgcactcttgcaccaacaccagcagccacctcccgttcccagggcttcaggtaccccctcgggagtgttttcacccgcatccatttcattcaggcagcagcactgcagccccttccaggttgagtataagctccgagggggtgccctcagcctggaggggaatgccatcttcccacgatggcctctcaggcccgcgctgtgatccctgttctctcccaggattcccaggccccaaaccagccctcatctcttggatggaacaggagagtgaggcttggagccccgccgcccaggatcctgagaagggggaaagactgggaggagctcggagaggtgagggatagtcccgggtccccccacttggttttccagggcttcctgtctagcagagtttcttttcaggcccccacttccagcatccctaaagaaattcaactgtgttgggtactagaggagtaaagaaggcagacctggtacaaagttttcagaacatgggacagcggtcctgtgaggactgggagcccagtccaaccaggcactccagcctgggtgacagagtgagactccgtctcaaaaataaataaataaataaataaataaataaataaataaataaataatagcccctgcttcctgagcacttcctaagtgcttaacatgcatctactcagctaaaccagtaacgctgtgaagtcaaaagccattattattcccatttgatgcataaggaaccaaggctcagataaggcacttttaggagatctgaatcctgtttaccttgttctaaagcctgtgtgttaatcactggacagaacttccctcactgccttaagtgaaaagcattctataacctgagacagtctgtgcaaaagtgtttgtaagtgtaacttaattccggtttcccaggagatgtcccaaacaggaaggaagaggaaccggaggaagtcccaagagccaaagggcctagaaaggctcctgtgaaggagagtcctgaagtgctggtggaacgcaaccctgacccagctattagcgtggccccggcacgggcacagccacccaaaaatgctgcctgggacccgaccacaggagcacagcccccggcacccatacccagcatggatgctcaggccggccagcggcgccacgtgtgcacggactgcggccgccgcttcacctacccctcactgctggtcagccacaggcgcatgcactcgggggagcggcctttcccctgccccgagtgtggcatgcgcttcaagaggaagttcgcagtggaagcgcaccagtggatccaccgctcctgctccggggggcggcggggccggaggcctgggatccgggctgtgcctcgggcccccgtccgaggtgaccgggacccgcctgtgctcttccggcactacccagacatcttcgaggagtgcggctgagcggcaccgcaggctggagttgagcctgaccttggcacgaaggactgacggatccctgaggtgggccactgagtcggggactccggaactgaaattcatgccctgggctttcctcaaggatccctcaagtttccaacttgtaaaaagaaaagtgcctgtaaagattcgaatagattagacttgccacccatctccccagtcttttgtttaacaaaaaaaaaaaaaaaaaaaaaaaaaaagaagagagtgagaccctggactcatttcaaagtgttatctgaagatcaggtgcaacagagacctttatatcatctcaggaactagccactccttatctatttcagatgcagatgctgagggggaccagggcctggggaggggacctacatggagggcgtggtcaaaccctggctaattgtcatcagcaggggacccagacactggagtggatgggagtagaatagatgcaggtggcacaaatccagcctctgttgggagaccaaggagggaggatcgtttgagtccaggagttcagaccagcctgagcaacaggctatctagcgatatctagatatctaggatatcactatctagagatagtgaaatcctatctctacaaaaaaaaaaaaaaaaaatgaaccaggcatagtggcacatcgtgcctgtggtcccagccacttgggaggctgaggtgggaggactgcttgagcccaggagttcaaggctacagtgagctatgattgtgccactgtactacagtctgggcaacagagcaagacttcatttctttcttttattttttttgagacagggtctcactctgtcactaagggtggagtacagtggcgccatctcagctcactgcaacctctgcctcccaggttcaagcaattctcctgcctcagcctcctgagtagctgggattacaggtgcacgccaccatgccctactaatttttgcattttcagtagagacggggtttcacatgttagccaggctggtctcaaactcctgacctcaggtgatccacccaccttggccttccaaagtgctgggattacaggcatgtgccactgcgcctggccaagactccatttcttagaagaaaaaaaaaaaaaaaaaagctggcgccatggctcatgcctgtaatcctagcactttgggaggccgaggtgggcagatcacctgaggtcaggagtttaagaccagtggccaacatggtgaaaccccatctctactaaaatacaaaaattagctgggtatgatggtgggtgcctgtaatcttagctactcaggaggctgagatgggagaattgcttgaacccaggagacagtggttgctgtgaaccgagattgcgccactgcactccagcctgggcagctgcgtgagactctgtctcaaacaaacaaaacaaaacaaaaactagtctctgcaacttaccccaggcacagctggtaagtcatgtgaacttcctgagtctcagtgcctcctctgtaaaatgaagatgaataatatctacctcaaagggttaccgtggagactgacattttaacaagatgtatgacatagtaattgtgcaatacacatttgttgaaagagtgaattactgtggatggtctacactttagaaagtgtaaagaagcctgccagggagccagggcatggatatcaataaccatgtttgcagataagtaaactgagactcagagagataacgtgatgctctcaagatttcactcccatgtggcagcatgggtggaaatgaacacagagcccagatgtctctaccacttcctttgagaagtcagatctggacagaaaacacgggctgggaactcaggatgcaggtcccagcccagcctgcttggggagtgtgagcagaaaactaagagtcccagtaagtgccccttttcttatcctttccttttctcttttatttttttgagatagagtatcactctgtcacccaggctggagtgcagtggtgttaacatggctctctatagccttgacctcctgagctcaagagatcctcccacctttgcctcctaaagtgctgggattacaggtgtgaggcacctcgcctggccagtttttacttagaaggcacagtcatgctgggcgtggtggctcacacctgtaatcccaacactttgggaggccgagatggaaggatctcttgagctcaggcgtttgagaacagcctgggcaacatagtgaggcccccatctctacaaaaacaaaaatcagccaggtgtggtggcgcgtgcctgtagtctcagctacttgagaggctatggcaggaggatcacttgagccagggagactgaggctgcagtgacccatgattgcgccactgcactccaacttgggcgacagagtgagactctgtctcaaaaagaaaaacaaaaaagaaggtacaattggcacttagtgactgtgtgttgagtgccttctgttgaagggactgtgctaggtaataggggaattccacgatgacgaaagctgaccccattcattcattcattcagcaaacaccctcctgaagcctctgtgggtttttgtgctgggctccagtgatacagctgagtcagggcccacgttcgacgtgggaagagattaattggcgctatgacagaggaagcccagaggcaccacctcacctaggctggttggtgatatgccaggaaatgttcctgggaggagatggctgtgcttcccatagcctatgaattggtgttgggggagattttcaggcagaggaaacagcaaaggagtcttgcttcatagaaagaataaaagacactttgggaggctgaggcgggcagatcacctgaggtcaggagttcaagaccagcccagccaacatggtgaaaccctgtctctactaaaaatacaaaaattagttgggcatggtggtgggcacctgtaatcccagctactcgggagattgaggcaggagaatcgcttgaacccgggaggtggaggttgcagtgagccgagatcgtgccactgcactgcagcctgggcgacagagtgagacattctgtctcaaaaacaaaaacaaaacaaaacaaaaaaactagataaggaagaatgggagacagatgcagccgagaagtggggtcaaatctgggagggccacagaggccaccagagcagcttgagatacattctgtggcactgaggagccacagaaagttcttgagcaagtgcagtgctgtttgccaggtgctatcagaagatatctttgcaaagcagtgtgggtgtgacctggttgggggacagagctagacactagagatctgttgggcattttttcctaagtgagggtcactgggagctgggaccaaggtggtgaccttggaattaggaagaaagacacgagaggcttctgacatagaatctgcagctcggtgactgccaatatgagccagtaagacccagaggttccagtatggagagccggagccaggggacctgatgcccaccaaggggtgatcaggagtaggagggtgtgaaggccaagggtgatccgttctggggagcagggaggccaaggagaaggtgcagctggagagaggaggccctgccagtgagggaggagcagaaccaggtgaagtgtgtcaagcataaagctgctctgggcagccccagctctggtgctggacacagggcaagtgctgtctgctatttctctttctcattggcgcatttaacaaatagctgctaagcgtttaccatgcactagctgttattctccatgccagaacatagcaggggaaacagacacaggaaccctcttggagcttactttctacgagggagagacaggtgataaaccagaacacgaatgaaggaagggactgcgaatgcaaatactaaggcttatgaaggagctcgaacagcgatgtgcagaaagagcctgctgcagaccgatactgaggctgcgccatgttgagaaagagccacagggaacagggttaggggacagggagtggggaagggcagggttcaaaggcttggggctggggtcggggagagtagggggtagagacgtttccaaagaaagggaacagcaagtgggatgttccaagctagggatgagttcccacaaggtgcagaaaggacatctgtagctgtgctgagacaccaggtggagaagattaacagatgggcttagggagggggaggcgctcccacaaggctctcgcttcccatgatgctaagtatcttttcttccttctctttctaacccccaccccgacaccacgtcttctttctttgtgacagggtctcgctttctctcctgggctggagtgcaatggtgcaatcatggttcactgcaggcttgatctcccaggctcaagtcatcctcccacttcagcctcccaagtagctgggatcccaggtgcacaccaccgcactcagctaattttttttccagacagggtctcactatgttgcccaggctggtttcaaactcctaggctcaagaagtccccctgcctcagcctcgcaaagtgctgggattacaggtgtgagccactgcacccagctccatgattctcagtatgttgggacatcactgggttgtctttgtttttgttttgtggtaaatatacataatatacaatttatcatttagactatttttgagtgtacagtacagttcagtggcaaaatgtgtaatagtactattgtagaaccatcacagccctccatctccaattttttttttcttttttgagacagaggagtctcactctgtcatctaggctggaatgcagtgttgggatctcaggtcactgcagcctctgcctcctgggttcaagcaattctcctgcctcagcctcctgagtagctgggattacaggtgcgtgccaccacgcccagctaatttttgcatttctagtagagacagggtttcaccatgtttgccaggccggtctcgaactcctgacctcatgatccacctgcctcagcctcccaaagtgctgggattacaggcatgaggcacagcgtctggcctggaaagttttttttaatgtgaaaaaatttttttagagatggggtctcactgtcgcccaggctggagtgcagtggcatgattgtagctcactgcagcctcaaacacctgggctcaggcaatcctcctgcctcagcctcccaaagcactgggactacagacatgtggtacagacatgtgctaccatgccccccggcggactacatttctttattgaaggctgccctgaaccttaaatttgccaaaggggactgtcaaggggaatggagaaggctgtttgtttgttttttttccatagagcttctcatgggaatactgttctgcagaatacactctgagaatgctgaagccagagagatgaggggacataatttttttctttttttccaagacagagtcttgttctgtcgcccatgccggagtgcagtggtgtgatcttggctcactgcaacctccgcctcctgggttgaagtgattctcctgcctcagcctccagagtagctgggatcacaaatgcacaccaccacacccagctaatttttgtatttttagtagagacgaggtttcaccatgttggccatgctggtcttgaacttctgacctcgtggtccacccacctcagcctcccaaagtgctgggattacaggcatgagccacagcacctgacccaaggaggggacataattaagatcatgaagctgagtcagtggcagaagtagacctggaacccaaatctcctatttcccaggcactgctcttcctgttttcactacaccaggctgcagtgacagatggacggcaaaggcaaaaggctggaggcccagaggccagctaggaggcccctggcctaactcagcaagggcctgagcaagaggggacagcggtgagagatgctacaggggaccctttgtgaagcgtttgtcacccatcctgggcaatttcacacacttcctagatatctgaacaaccccccattacatgacccctaaacaaccctcttatttttagtacttatcatagtctgtcatttatatttttctttacatttatttatttatttattttgagatggagtttcgctcttgttgcccaggctggagtgcaatggcacgatcttggttcactgcaacctccgcctcccaggttcaagcgattctcctgtctcagcctcctgggtggctgggattacaagtgcatgccaccatgccccgctaatttttgtatttttcatagagatggggtttcatcatatttctcaaggtggtctcaaactcctgacctcaggtgatccaccagcctcggcctcccaaagtgctgggattacaggcatgacctaccgtgcctggccttatttattattattgttttttgagatggagtctcgctctgtgggccaggctggagtgcagtgtgtgatctctggtcactgcaacctccacctccaggttcaagcgattctcctgcctcagtgttctgagtagctggtactacaggcacatgccaccatgcccatctaatttttgtatttttagtagagacaggatttcatcatgttggccagactggtctcgaactcctgacctcaagttatctgcctgcctcagcctctcaaactgtatatttttcctctttacatttacatggcagtgtagtaacctagcctaaaatcccacctctctctagttgctaaggttttgccttcaataatttgaggcattccagcctggcttctggggtcagtgagccaagatcatgccattgcactccggcctgggggacaagagcaaaactccctctcaagagtagagagtagaggccgggtgcagtggctcacgcctgtaatcccagcactctgggagacccaggcgggtggatttcctgaggtcaggagttcaagaccagcttcgccaacatggtgaaaccccctctctactaaagatacaaaaaattagccgggcgtggtggcaggcacctgtattcccagctactcaggaggctgaggcaggagaatcgcttgaacctgggaggcggaggttgcagtgagccgagattgcaccattgtactccagcctggacaacaagagcgaaactacgtctcaaaaaaaggagagagagagtgtgtaaagtggaatagaatagaatagaaaacaatttaaaaagaactaaaataaaataataaaataaagacttggcgccgggcgctgtggctcatgcctgtaatcccagcactttgggaggccaaggcggggggatcacgaggtcaggagatcgcgaccatcctggccaacatggtgaaaccccgtctctactaaaaatacaaaaattagctggacgtggtggcgcgtgcccgtaatcccagctactcgggaggctgaagcaggagaattgcttgaaccagggaggcagaagttgcagtgaacggagatcgcgccactgcactctagcctggcgacaaagtgagactctgtctcaaaaaaaaaaaaaaaaaaaagactccgtcactgagtgggcctcctcgaagggcctcctctaagggactgggaaggggacgtcaggccctcggtcgagaatcttggaccggtttcccctcccctgcagcctttgctgccacctgcctgagcccaggtcaaagcggccgcacccatcttaactacgggcaagaggcgctgccaaggccgcctgggaggaacagcaagagaagacttttccagcaggaacaaactaggtcagcaacaccggatcgatattcaagctgttcaatgcctttctctaaaatgaagagaagctggactgtcgccagccatcttttcttcttcttttttttttgagacaagaatctcactctgtcacccaggctggagtgcagtggcacgacctcagctcacttcaacctctgcctcccgggttcacacgcttctcctgcctcagcctcccaagtagctgggattacaggcgtgtgccactatgcccggctaatttttgtatttttagtagagacggagtttcaccacgttggtcaggctggtcttgagttcctcacctcaagtgatccacccgcctcggcctcccaaagtgctgggattacaggcgtgagccaccgtgcccagccgccagccatcttttctaagagcgctttcatttttctggactccggaaccacagagttgctcgccgtcctctctaggccccacccgaagctactaccggtcgtcgaggcgtccgtggaacctcctgcaccctactcccagggcaaacccccagcgtccctccgggagccgcggagccactggccgcgctcatggctccaagccaatgaaccagggaaggtggaagggacggagactgggaaagtgtctgaggaccgagagctccgcggaaacggccgactgccgcttcctggcgcagtgggggtgtctgcggtatagggatgttcgcgtcctgatccgggacgcgatgccgcgacctgcggccacctagacgcgctcagcggcgcccgccccacccggatccccgaaaagggaaagaagtggctctcctcacttatgcggcaggttgagctgtttcctgagattcccgccagatcaccctccctgaagttccctccaggctcctccacaggggctcccctggacctcctgtaaaacattcacagcctggtatactgatatattctgagttaaaaacagagaaattgtagtttcagaaggagcaatccgacctgtttcttctgcatggagcatgccagaaaccttactctgggggagtatccttctgtaccagggcaagaaaacagccctgagaagccacaagggaccagaataaacatacgtaacaaagtcatctgtatcttgtacctgtttgacaaccccctgatacatattctagttactcactgccctagccaaattttctttgtcctgtcatttcttttttcttttattctttctttcttttattttttattttttatttttgagaccgagtcttgctctgtcgcccaggctggagtgcagtggcgcaatctcggctcactacaacctctgcctcccgggttcaagctattctcctgcctcagcctcccaagtagttgggactacaggcacgcaccaccatgcctggctcatttttgtattttcagtagagacggggtttcaccatgttggccaggatggtctcgatctcttgacctcgtgatccggccacctcagcctcccaaagtgctgggattacaggcatgagccaccgggccggccctcttcttcttttttttttaaacgaagtctctctcccgcccaggctggagtgtagtggctcaatcttggctcactgccacctctgcctcccaggttcaagtgagtctcctgcctcagcctcctgagtagctgggattacaggaacccaccaccacccccagctacctttttttttttaatttttagtaaggacggggtttcctgacctcaagtgatctgcccacctcggcctcccaaagtgctgggattacaggcatgagccaccgcgtctgcccactgaaattttattgttctttgtctaaaaaatataaaagcacctggctttgggcactttttctgacttccctctcttgtgaagatccccatgtacatgtaaaactaatacaattggtataattttctcgtttgtccactgtcaattcatttgttcttattttactttagtttatttttatttttattttttgaagatagggtttcactaacttgcccaggctgatctcatactcttgggctcaagggatcctcctgcctttgcctcccagtagttagcattacaggcgattctcaatctgggcctacattcaactaaagagcccaccaagagctaaaaggcagttggaggcaactctgactcccatacacagtaagggaggagaccatccctcatattgtcttacgcccaatttctgcctccaaagaaagaagaagtaaaaactcaaaggcagaaatggaatccacaggcagacagcctggcgccacaccctgggcctggtaaagatcgacctctgacctaatcagttttgttatttatagattacagacattgtatagaaaagcactgtgaaaatccctgtcctgtcctgtcctgttctaattaccagtgcctgcagcacccagtcacatatcccctgcttgttcaatggatcacgaccctctcacggggacccccttagagttgtgagcccttaaaagggacagggattgctcactcggggagtcggtttttgagatgtgagtcttgccgatgctcccagccgaataaaacccttccttcaactcggtgtctgaggggttttgtctgtggcttgtcctgctacaacaggacatgtatgaagtcacgtggagcacagaatagaccatcagaaagtgagagagaggtctgggggagagttggtgacatttactagataaagaccctaggggaagcagattggggcaagaaagggatgagttggatttgagtagaggagccttgggccatctgtccaggggcaggatgtgaggggaggtgagagcccggctgcagctacagggagactggcaattgggaggcgtcctgagcagcacatgggagaagctcctagaagagaggaccctctgactttctcaaccttaccctactctccccactgcctccgccatctagaaacttccagaatttcaggccccaacaagcctacgatggaggaggttctcctgtatccactcctttttctttctttctttcttttttatttttgagacagagtttcgctctgtcgcccaggctggagtgcggtgaggcaatctcggctcactgcaaactccgcctcgcgcgttcaagcgatactcctgcctcagcctccccagtagctgggattacaggtgcacgccaccacacctggctgtttttttgtgtgtttttagtggagacggggtttcaccatgttggtgaggctggtctcgaacttctgacctcagttgttccgctggcctcggcctcccaaactgctgattacaagcgtgagccactgcgccacgcccactccattggtttttttacactcaacattgggaagagactgctgttgccctgtttctgagataacaaggacaaaacgagagagtgatgagctggagcccgattataaaacggtccacaaacgaaaactaatgcctgagttcagtaaggccgggaggccagctcactcccgcgaggcgctcttttgttcgtgcaaaccggggcggagctctctgctgcaccgcctcgccgggccggggcggagctctctgctgcaccgcctcgccgggccggggactaaacatgcgcggctagttttcaaggccggcctctgtattagtcaccgcggccattttggatgagggtacggagagaacgcggactggagataccgggggcgttgtcttgggcacgactgcgtaggggcaaaggtcgagtacccgcgccgccgccattttttatgagggcatattccatttctgattatacacccgctgccatcggcaccgttagtttccacgccctctagtgcgccctcgggggccctagtaacctccctccttcccttgggcccgggccggggaggctttctcgggcgcaggaggttccgcaggcccaggccaggccaggggaggcagccgatccgtcgtcggggttgacagttaccatggcgccgcctctggccccgctccctccccgggacccaaacggggccggacccgagtggagggagccgggggctgtgagcttcgcggacgtggccgtgtacttctgccgggaggagtggggctgcttgcggccagcgcagagggccctgtaccgggacgtgatgcgggagacctacggccacctgagcgctctcggtgagagccccacctgctcgcctgagccctgcgcccccacaggccctgccgcgcctctgggagctgcgcgtgaagttgggggccccggggccgggcaggtggcctccccgcagcgtggggtttgcgttcttcttccctaggaatcggaggcaacaagccagctctcatctcctgggtggaggaggaggccgaactgtggggtccggctgcccaggatccggaggtggcgaaatgtcagacacaaacggacccaggtggagtatcgggtgctcagtcccatggggacttctctgttcctgtcccatcccggtaccctctgccacctccagctacctgcttagcagtttcctctctgaactgccttctcaactgcgacgacgaggctgagcccctgcgtggctcccagatgcagcctagaaaggagctgtgatgggggctctggccctgccatacccgcctctgagtcctcacctctgcgtggtcactacactctgggggctttttttggtgtttttgttttagagacagggtctcgctttgttgtctaggctgagtgcagtggcggcatcatagctcactgtagcctggaactcccgggcttaagcagtccttccacctgggcctccagagtagctaagactgtacaggtgctcgccacgaagcctgggtaatttttttttttagacagagttttactccgttgcccaggctggagtgcagtggtgccatctcagttcactgcaacctcccactcccaggttcaagtaattctcctgtatcaacctcccaagtagctgggattacaggcgcccgccaccaagcctgcttaatttttttttttttttttgagacagagtcttcctctgtcgcgcaggctggagtgcagtggcgccatctcggctcagtgcaagctccgcctccctggttgacgccattctcccgcctcagcctccccagtagctgggactacaggcgcccgccaccacgcccggctaattttgtttttgtgtttttagtagagatggggtttcaccatgttagccaggctggtctcgaacttctgactttgtgatctgcccgcctcggcctcccaaagtgctgggattacaggcgtgagccaccgcgcccagccaattttttgtatttttagtagagacagggtttcactatgtcgcccaggctggtctttaactcctggagctaagcgattcgcctgcttcggccttccaaagtgacccactgcgtctggcctaattgttttaaattgttatgtaatatatatattttatagagggggtcttggctctcggtgtgttgcccaggctggtcctgaaatcctaggctgatcctccttctctacctcccaaagcgctgggattaccgccttgagcccccacgcccagtctcttaaactctgttgactctacctccacctcaggacccacccctgccgttcacctgcaggctggttcctttctccccgtccgcccccctttttttctttcatttcttgccctcagcctttgcagagtatccagccccactgaacttggccatgccctcctggttctgcctttcttggtgctgttcctgctgcctggaacatcctcaggtgtccgttcctccttctggatcaggcccagatgttcatgtcatctctgcccttcccccaccgtgacatttccccagccccgaggcggaatgggctgttctctccctcccggctctgtctggctctgcagccgaggaacaggtgtcactcctccatctcccaggagcagccggggatccagcaggcctgtccctgtccacgcgggctgtgggattcaaggaccaggatgagccgagcctgaactctcccctctttatctctcagcagattccagaaacaagaaaaaggaaagacaaagggaagggacgggagccctggagaagcccgaccctgtggccgccgggtctcctgggctgaagtctccccaagccccctcggccgggcccccttatggttgggagcagctgtccaaggcaccgcaccggggacgcccctccctctgtgcccacccccctgtcccccgagctgaccagcgtcatggctgctacgtgtgcgggaagagctttgcctggcgctccacactggtggagcacgtctacagtcacactggcgagaagcccttccactgcactgactgcggcaagggcttcggccacgcttcctccctgagcaaacaccgggccatccatcgtggggagcggccccaccgctgtctggagtgtggccgggccttcacgcagcgctcggcgctgacttcgcacctgcgcgtccacaccggcgagaaaccctatggctgcgccgactgtggccgccgcttcagccagagctctgccctctaccagcaccggcgcgtgcacagcggcgagacccccttcccctgcccggactgtggccgcgccttcgcctacccctcggacctgcggcgccacgtgcgcacccacaccggcgagaagccctacccgtgcccggactgcgggcgctgcttccgccagagctcggagatggcagcccacaggcgcacccacagcggcgagaagccctacccctgcccgcagtgcggccgccgctttggccagaagtcagccgtggccaaacaccagtgggttcatcggcccggggccgggggccacaggggccgggtcgccgggcgtctgtctgtgaccctgacccctggccacggagacctggacccgcccgtgggcttccagctgtacccggagatattccaggagtgtgggtgacggccttaaaagtgactatctagacattacgggaggcccgagatgggctcaggggcccgaacctctgcggcggcctgcagggaggtcccagaatctagggcaagagctggccctggggtgcggacagtctgatcttgggcccttagcagcctcctctgccagcaccttgctccccactgcccagggctctccaaggccccctctactgaggcagggctgagttgagaacccccagacctacataaggggaaccaaaagctgtttctcagcccagaggtgctaagaggactgaggtagaggagaaccttgttttacccattgtctttttaaattttttatcattatttttattcttgtgaccctcccagaacacaatactcattgtctttttatttatttatttatttatttctgagacagcttcctgctctgtcacccaggctggagtgcagtggtgtgaacagggctaactgcagcctcaacctgcagtgctcaaggaatcctctcccatcagccttccaaatatctgagactacaggcgggcaacactacggccagctaatttttaaattttacatagagatgaggttctcactgttgtccaggctggtctcaaactccttggctgaagtgatcctgtcgtctcggcttccgcaagtgctgggattacaggcgtgagctaccaccatgcctggcttccattgtctttgtgtgtgtgtgtgtgtgatggggttttgctcttgttgcccaggctggagtgcaatagcgcaatctcagctcactgcaacctctgcctccagagttcaagcaattctccttcctcagcctcccaagtagctgggactacaggcacccaccacctccattgtctttttactgcccaagttaaaatcctgtgactgtgtactggatctggcctgcggttgtcatatttattgatctgagtccaggcagtgtttttaagtgatatgagttagtagtgaaaattgaaaaggatattttacaaccaaatacaggttttctggtgtcttttgaaaaatccaaagatttggcaactcgacctaggctccgacaaaaccacagttgttgggagctgagccggagccagaactcacaattcaccgtggcccggccacccatccccaccactcccgtgggctcctgaccaagcaccacgtgccattcatcatggcttgcttttagtgtttttggtgtttatcttaaagtacagcgaagaagaaagggaagtatttcttagacccatgtctctgtccaaataggcctttccatctggcatttcccgctcatttatatgacttgctgagttcctatggtcatttgagtttgcaaacagtggtctgtagcactcaggttttctggagttggagagaaagggtggcaagagagaagtaaaagttggttttattttagatctttgcttgtattgcattttatggtttacaaagtactgtctcttccattgaatcatttcaccttcataagtgctgagagaaaccccttggttgaagaggacagcctggtcaggaagaggcagtcaggactgcctttcatcccaaaccaaggggtgtgtccgccatcagccaacaggcagttcctgtttttgaatgggaaggttttgagagctccctccagtcttctttgggcctccctgagatagccacatgcctcaggacttcttagccctcctagaccctgccaggagggccttatcacagttttgaactagaagagatcttcactttcctaggcttttacagttggagacactgagaccaaggagggctaagcagcctgtccagggtcacacagagaccccagggttcttagctgactgctgactttacccatcactcctgaggccttcactggtgtctcagccagggttttgcaggcatctgcccctccctgtgataacacccagccctgacctggatggggtcagactagcccagcatcagtgaagcccacgtaccagatgagttctgacaaagtggccatgtgacagatcaggtcaactcagaatccaggcaacgaggagagtcccaaggcgcacagaccttgcatttttcctctgtaccatcatgggcagagcggggtaggccaggaacacctggtgttagattagatttgtagccaggggtgactacccatctgtatccccaagctctgcacagaatccccacccccattatccatctaccactaattcctttgtgggcagagtctagccatgggcagcccctgccctgctcctggttaggacaacatctccctgaggagagcaagggcctgtgacctctgctggcctatgcagagtcacccagctcagccctgtgtctggcctacccaggaaggaagaaaccagattaatcaacctggaaggaggtagaagttttggagaaaagacactgttccggtgtcaagtgaagtaatgaactgactttattccaacctcatctccaatccgaccccaccaaggtctctctctccttcagcttttctggggcgggttgactcgtgcgccaccttatcacaggggcatattggggtcagaagaggaaccttggcagtagaagatacctttgtaccagttttttttttttttaatgttttgtttttgagatggagtctctctctgatgcccaggctggagtgcagtggcacgatcttggctcactgcaacctctgcctcctgggttcaagtgattctcctgtctcggcctcccgagtagctgggattacaggtgtgcgccaccacacctgaccagtttttgtatttttaatagagatgaggtttcaccatgttggccaggctggtcttgaactcctgaccccaagtgatctgcctgccttgacctcccaaagtgctgggattacaggcatgagccactgcacctggctattttttgtatttttagtagagatggggtttcaccatgttggtcaggctggtctccatttcctgacctcacatgatccgcccgcctcagccttccaaagtgctggcattacaggcgtaagccactgcacccggcttttgtaccaggttttaattcctagtgtacaacctagttccctcccctaaccctcagcacagcctccgggaggcccagcttgcaacaccagttctcagcccagactgacagccagatcttggccctcagcttgccacttaaaggtgctatgattattatctagagatctctgagtgctttgaagtttgtaaagcttatttagggcctagaaaccagacctgactcctctgcttcctgccctcatgacccaactttccagcatctcatcaattttttttagtgtcatgaaacccttcagcctcagccccaccccattctcagctcctcatttcttttttcttttttcttttttttttttttttttgagacggagtttcgctattgttgcccaggctggagtgcaatggcacaatctcggctcactgcatcctccgcctcccgggttcaagcaattctcctgcctcagcctcccgagtaactgggattacaggcatgcgccaccacgcctggctattttttgtatttttagtagagatggggtttcaccatgttggtcaggctggtctccatttcctgaactcaggtgatccgccctgagcctcagccttccaaagtgctgggattacaggcgtaagccactgtgcccagccagctccttgtttcttggcacagatatttccaccagaggtagggcctccttttctctctgctaccacaggtctttgagggtcagccccagaagcaattgaagtcaggaaggggctttcccaggcttcactgtgcattgaggatatgcttgtctgcatcaacagaataagccacatccaagtggccagccagagtgagaagtaaaggccatggccacatgcccatccctcgtctgtccaggccatttaagggtgggagaccgggtgcagtggctcacgcctgtaatcccagcactttgggaggccgaggtgggcagatcacctgaggtcagtagttcaagaccagcctagccaacatggtgaaatcccgtctctattgaaaatacaaaagttagccgggtgtggtggcgggtgcctataatcccagctactcaggaggctgaggcatgagaattgcttgaaccagggaggtggaggttacagtgagccaagattgcgccattgcactgtagcctgggtgaccagagtgaaactccgtctcgggccaggcgcggtggctcacacctgtaatcccagcacgttggcaggctgaggcgggcggatcatgaggtcaggagattgagaccatcctggctaacatggtgaaaccctgtctctactaaaaatacaaaaaaaattagccgggcaaggtggtgggcgcctgtagtcccagctactcaggaggctgaggcaggagaatggcgtgaacccaggaggcggaggttgcagtgagctgagattgcaccactgcacactccagcctggatgacaaagcgagactctgtctcaaaaaaaaaaaaaaaaaaaaagagtgaaactccgtctcaaaaaataataataataaaataaggctaggtgttgatctgagctccaagacccctaaaactccttggaatgtttgtgtatgtgtgtgtctctaggaataggcatgtaggcatgcaaagatgtatatgacccaaagaagttaatactaggctagtattttcaaataaggcctccctgatgcagaatcacgaggttatcttttattattattatcattattattattttgagacggtctgtctgtgtcacccaggttagaatgcagtggtgtgatcttagctcactgcagccttgaattcctgggctcaagccatcctcccgcctcagtcctgcatagctgggactacaagtgtgcaccattatacctggctaattaaaaaaaaaaaattttttagagaaaagttctcactctgtcacccaggctggtctttcttttgttgttatgggtttttatttttggaacctgtctcaggagcccaggctggtctcaaactcctgaccttgagtgatcctcccatctcagcctcccaaagtgctgggattacaggtgtgaaccactgtgcctggctgagtgtcttttaaaaatgtaggttgccaggcgcagtggctcatgcctataatcccagcactttgggagcccaatgggagcagatcacttgagccccagaagtttaagaccagtctgggcaacatggcgaaaacccatctctacaacaattagctaggcgcggtggctcacacatgtaatctcagcactttgggaggccgaggtgggtggatcacgaggtcaagagatcaagaccagcctggccaacatggtgaaaccccatttctactaaaaacacaaaaattagctgggtgtgattgcaggcgcctgtagtctcagctactcaggaggctgaggcaggagaatcacttgaacccaggaggcggaggttgcagtgagccgagatcacgccactgcactccagcctggtcgacagagtgagactccatctcaaaaaaaaaaaaaagagagagagataaaggcatgtcaggccaggcagtgactcatgcctgtaatctcagcactttgctgagtgacagaagaagactgactctgtctccagaaaaaaacaggcacgttcagagaacaaagattccatccatttagctggagctaagtgggatcgtttgcctgtagggaaagatgggggtttgactttgagaaggttggtttgccatgggcctggaaggtcatgggggtactggctatgaacacttttttgagacagggtctcgctctgtcgcccaggctggagtgtagtggcgtgatctgggcccactgcagcctcaacctcctggactcaagtgatcctcccacctcagcctcccaagtacctgggaccacacgcacttgccaccacgcccagctaatagagcccatgcctctatcttaatgagcctttgttctagctactctgttctatataggctacacttgcaaatcaaattcctctgtcaatgaccttcaatgctatctctaagaaattcctccaggagtctgtctgtcccatgctagaagcctcagaactgtgcctctgtgtttttatcctggacacaatctgcctagaaggtcttccccaaactcgtgtcagctgaattcatacctggtatctctctcccccagcttagtgtaaacttagtgcagggactttatcttgcctcaccaatgtcttcgccacccaagaataatgcttggcacacaagagggggccaatacatttttatgaaatgaatgtagacttaggatatgtgtctgttttttgatatgtttcctgagtggtcagtgttcttccccaggattccctgactccaaaccagccctctgttagggacaaactgcccaagaaaccttcttggtgctgtccacccatcccccaagcctctttacatttctaagcccttacctaggcaccacggtgaagccagcagactttgcttatcagaccttgctgcaataagcaaaccccaattacaaaccacccacactgcacagggggaggtcatgggaaacataaacaaactttacctacaccctcctgtaataaacgtcacaaggtaatatgtagcaaaattaaccagcaaacaaccccaggatgcggccatacgaaagaactccatcaaactcccctccccaatataaacccctcattctgtaagcttggggctacttcctctctgactgttaagggagcagccagcaggttaataaaaagttacctgcctaactttgggtctgtttttcctttctcttggctgaccttacattctggtgccaaaacccgggaaggggatagcctctggccaggactcactcactcactcactctctctgtctgtctccctccctactccctaccctatcacccctcttccagccaatctccccttccctgaacctgccaaagacccagagaatctcctagactctcccattgctgacgacttcatccaccacctccaccagggtgagtaaaaagagactgttgccgttcctcagaacccttgaccatccatctctccatttctgaaagacccagcgctgggccaagggcttcctccggcctgtgggcctctggttcctccattttagggatgcctgacacggcagttacctcctctattccggacaagttccgcaagaaaggggacgccctctcccaccgtccttgtcagcagcagtctcttcttcctctacccctacctcctccattccgcaatctcaatgctctcgggctccattcagaggtccgttctttttttttttttttgagacggagtctcgctctgttgcccatgctggagtgtagtggcatgatctcggctcactgcaagctccgcctcctgggttcacgccattctcctgcctcagcctcccgagtagctgggactacaggtgcccgccaccacgctcggctaattttttgtatttttagtagagacggggttttaccgtgttagccaggatggtctcgatctcctgacctcatgatccgcccgcctcggcctcccaaagtgctgagattacaggcgtgagccaccacacccggcccagaggtctgttctaagaggcttatcttttactgcaataccacatggcctcaataccaactggacagtggctcccaatggcccaaaaatagcactttacaacttttgccatcacagtgggaaatggtctgagattccttatgttcaggttttctttaagggaggagaccacccctcatattgttttatgcccaatttctgcctccaaagaaagaagaagtaaaaggcagaaatgaaatccacaagcagacagcccagtgccacacactgggcccggtagttaaagatcgacccctgacctaatcggttatcttatctatagattacagacattgtatagaaaagcactgtgaaaatccctgtcctgggctgggcgcggtggctcacgcctgtaatcccagcactttgggaggccgaggcgggtggatcacaagggcaggagattgagaccatcctggctaacatggtgaaaccccgtctctactaaatgtacaaaaaattagccgggcgtgatggcgggcgcctgtagtcccagctacttgggaggctgaggcaggagaatggtgtgagcctgggagacggagcttgcagtgagcagagatcgcgccactgcactccagcctgggtgacacagcgagactctgtctcaaaaaaaaagaaaatccctgtcctgttctgttccgatctaattaccggtgcatgcagcccccagtcatgtgccccgtgcttgctcaatagatcacaaccctctcacgtggacccccttagagttgtgagcccttaaaagggataggaattgctcactcggggagcttggttgttggagaagtgagtcttgctgaagcacctggccgaataaagcccttccttctttaactcggtgtctgaagggttttgtctgcaggttgtcctgctacatcttcactctctgtaactgccattccctctgtcagtcttgttctactttctaaatcctccttgtccgctccaaatctgactcgcctcctatcctcctccccacagccccagcttaggacgattcctcttcctttgactctgccaattttccccctccccgacagcatcacgatcctccacaggagcatcctaatcctccactgtatgtccccgttccagctctacccttctccccgtctctcaaaccaccccgcttctgactctggttcctctccgtctccacccctcacccgctcttgggcccaacatgttcagcaaccagctcccttacttccccttcaggaagcagcaggagctgaaagtattgttagagtttatgttcccttctccctcactgatctctctgtaattaacaaaagacttggttcatttccagaagaccctacctcttatattaggaagtttcagtaccttacccagtcttatgaactaacctagcataacccctacatcatcctctcttctaccctcaccccagaagaccgagaccataactggaccctagatcaggcacatgctgataccattcatcaccaggctcctgcccagcctactggtgcaaaggcagtccccaaccaggaccaccctaggattatcaagacggggcctctggacgccaccattgagaccacatgattgtatgtctctttacaggactccaaaagtttgcctataaagcggtaaactataaaaaactttcagaaatcacccaaggttcctaacgaaaacccagccctttttctctctgatttaactgaagccatgagaaaatataccaacccagacccagccagcccaaaaagaaacactattttaaaccttcagtttgtctcccaatattttaaaccttcagttcatctcccaatccactcccaatatttgatgcaagtttcagaagcttgacaatggccctcaaaccccacaatgagaccttcttaatttagccttcaaaatctttaacaatcataatgaggaaaataaaaggcaaaaacaggcaaagtttcaaatgcttgcctttgccattagaggccctgcaggcccacgggaccgcagctccacatggaagcctcctaacaattcacttccacctggcacctgttccaagtgtggcaataaaggccactggtccagacaatgcccaaacccaggaaagcccaccaggccatgccccctctgtggaggaccccactggaagtcagactgtgagtggccccagcaaggactgcccccatcccctcctgagccagccaaaacctcctactcggatttcatcggccttgccactgaagacttgacggtgccctggaatgaacgcccccagcaactaccatctcttcattcaagccaaaataaccctaatggtggcaaatgggccagtatatatattttttaaattaataccgggacaaactactctgctttacctaatttttcaggacccacccagtcctcccaggtctctgttgtaggaattgatggacaagtcaccaaaccccgagccacccctccactcttctgctccctgcacagtttttccttcactcactcttccttagtcctgccctcatgtccaactccgctcctgggcagagatacccttttcaaaactccacactattctccacctccatggtaacctacttagaaattcaacttcccctggggcctggactgtgaccccagcctgagcagcattaataatctaccccccgcgctcttccaaacgagaaatcctttccttcccagggttagcaggcttctttagaatatggattctcaactttaccctcctagcttgccccctctataaagcggccaaacaccctctcgatgaacccctaaaaccctcacataacatactccccagcttctacaaactcaaaaccgctcgtcactgcaccaactctgtccttacctattatctcccaacctttcactctccatacttccaaaaactgaggaataaccctcgatgtcttaggacaacaggaaaaaaatcctccttcttttgcccctgtaacttacctctctaaacaactagatgacacagtcaaagggtggccaacctgccttaaagcactagcagtggtggccattttagctctaaaaagcaggaaactaactttcagccagaataccaccgtctgcagtcctcataatctacaagatctcctctcctcctgagcattaggctccctttctccttcatggattcaatcactccatgccttttttttttttttttttgagatggagtttcgctcttgcctcagtgtcttgcatagctgggattacaggcgtgtgccaccacgcctggctaatttttgtatttttagtagagagggggtttcaccatgttggccaggctggtcccgaactcttgacctcaggtgatccacccgcctcagcctcccaaagtgctaggattacaggcgtcaaccaccgcgcccggcttactccatgccttctttatcgaaaatcccaaattcagtcttttcaaaagtgctcccctcaacccagcatccttactccctgtatcttcttccccttctactcattcttatactaacatcctagatcacctgcagccacactttctaaacatttcctcccagcctctcaccaaccccaatgaccagctatttatagatagctcctcttccgtacccactggctcccccaaaattgctgggtatgcagttgttttccttggccgagtaattgaagctaaacccctacctccaggaacctcctctatccctcctctccacaatatacaatgcaatccctgcctcagcctgtaactggacttccacccaagtaacctaccatcccgaaatcctcattaacagccccctcgaactcgacatgcaggcattaacagaaatctcccctcagttagctaatgagttgggtccagctgttacaaccttacatccctatttacgcaacctatccccctaccacagctgtgataaacccgtattaggagccataacaacccacaaaatcttatcctatccagcactgctgtgcatccaatgacatctaccctctggcattcccctcagccacctgaattccaaactgcaactttaccctacaactcaaacctcccaccgaacatactactctcaaagccgccaacaaaaaagacaggctttatttctctagcctccacctccttaacaaaaattaagggtactgtaatggccaacacctcccctgtttatccctcttcccttgactcccctctccatgcaccatccttaccctacacccaccacccgggactgtctccttctcccaacattcaacaacactcccacatgcatcttagtggaaacaaaacgcttcctcttacactggcaaaaaaaagaacccaaaagcctcccagcctaaaccaaacacccctttacaaccacttacagcagcagccctagccgggaccccagaagtataaatgcatgaaaataacaaaatgtatatctttttagcatacacaccagttctctctaacaaaccaaggcatacttttcctatgcagtacctcaacttatatttgcctcccctctaactggatgggcgcctgcacaccctggttttcctcagtccaaaaatcaacgttgccccaggagaccaacccctaccaatccccgttaatacccctatctgacaccgccgtgctatacaactcatacctctattagtagacctcggaataactacaggagttggaactgggattgcgggattaaccacctccgtttcctattaccaatccctctccaaagacctcacaaatagcttggaaaaaatagccaaatccattacaactctccaatcacaaataaattatttagcagcaatggttcttcaaaaccacagagacttagacctactcacagccgaaaaaggaggactctgcctttttctagatgaaaagtgttgcttttatcttaaccagtctggcttagtacaacatgctgtaaaaagactaaaggaccgagcacaaaaaattaaagaaaacatcccttgatggccagcgtggccctcctggtcttttaatacctagtttccatagctaatgccccttctaggcccggccataaccatttttcttttcctagcattcggcccttgtctcctacaccatctcacccagtttttacaggaccgtatcagagccttcacctatgcgacaatacaagatataatgctgctccaggaataccaatggctccaaaaactgtagtccctactgtccagccttcccccacaaccgtcgccccttcccagcaagaagcagccagacaatggcacccctcttctattacctattaaagggctggaatgttagggacaaactgcccaagaaagcttcttggtgctgcccacccttcccccaagcctctttacatttctaagcccttatctaggtgccgcggtgaagccagcagacttcacttatcagaccttgctgcaataagcaaaccccaggtacaaatcatccacaccgcacagggggaggttgtgggaaacataaacaaactttacctacaccctcctgtaataaacgtcacaaggtaatatgtagaaaaattaaccagcaaacaaccccgagatgcggccataccaaagaactccctcaaactcccctccccaatataaacccctcattctgtaagcttggggctgcttcctctctattaggggagcagctggcagattaataaaaagttgcctgcctaactttaggtctatttttcctttctctcagctgaccttacaccctcatctcctgggagtaggaggaggcccagctgtgagtcaaaatgcccaggatccccaggaaggaggaagcctaagagaaaggcagaaaggggagaagaggggatgacgtctccgtcccagctggaagaggatattttgttgaggaaggaatgctatttatatgttccttactcctggtgtgactcatttttgctgacctgaatttatgacattccctggagcctggcatcttgaccttctctttctcactttaagggaggagaccacccctcatattgtcttatgcccaatttctgcctccaaagaaagaagaagtaaaaactaaaaggcagaaatggaatccacaggcagatagcccagcactgcaccctggttaaaaatcaacccctgacctaactgcttgtgttatctatagattgccagacattgtatagaaaagcattgtgaaaatcccagtcctgttctgttccgttctgattacctgtgcatgcagcccccagtcacgtacccactgtttgttcaatcaatcattaccccctcagagatgtgagcccttaaaaaggacaggaattgctcactcggggagctcggtttttggagacatgaatccgccgatgctcccagctgaataaagcccttgcctttcacaacttggtgtctgaggggttcttgtctgcggctcgtcctgctacaattttttttttgagacggagtcttgctctgttgcccaggctagagggcagtggtgtgatctctgctcactgcagcctccacctcccaggttcaagtgagtctcctgcctcagcctcctgagtagctgggattacaggcacctgccaccacacccggctaatttttaattgttttttagtagagacggggtttcaccatgttggccaggctggtaatgaactcctgacctcaagtgatctgcccccgtcaggctcacaaagtgctggggttacaggtgtgaggcaccacacctgaccgagactgggcttcttttctttctttctttcttttttttttttttgagatggcgttttgctcttgttgccgaggctagagtgcaatggtgcgatcttggctcaccgcaacctctgcctcccgggttcaagtgattctcctgcctcagcctcctgagtagctgggattacaggcatgcgccaccacgactggctaattttgtatttttagtagagatggggtttctccatgttggtcaggctggtctcaaactcccgacctcagttgatcggcccgcctcagcctcccaaagtgctgagattacaggtgtgagccactgtgcccggcctttttttttttttaaagatagagtctcactctgtcaccaaggctcgggtgcagtggtgtgatctcggctcactgcaacctccgccttccgggttcgcaccattctccttcctcagcctctggagtagctgggattgcaggcatgtgccaccacacccagctaatttttgtattttttgtagagatggggtttcaccatgttggtcaggctgctcttgaactcctgatctcaggtgatctgccctccttggcctcccaaagtgctgggattacaggcgtgaggcaccgcgcccagcacttaatttgactggtgacatcccatgggactacagtcaggctgtgctatgaatcggcccattcagtggcagtgtgtgaattcaaatttaggatgaagaaagttcacctttctgtctccaggcccccaggccctggaacagctgcctgtgtagttgatggtggctcctctggttggccttgaggtgtgtgggaatgtcactgcctggtgagctcctcagttggccagcactgtctgggggtgggggatgagggtggctcccaggggtacccatctgaatgctgctgttgtgaaggttgattctgtcacctgaatatgagtaggccttgaggagttgacagggccagaggtaagttatgaatcagcagtttcccaatggccactcagaaaaatgacacatttggaagggaccagcaggagtctatttgggagctgtcataagcccttggtgtcagaaacactgacctggtctctgagcctttggccaaggctccctgtagccagaccttccccaaatctgcagtctctgcccggcctcaacatctggcactcactcagcacctcattcctgtccccagtgcagccacacttcgccagtaccttcagccaggcctcaggtactccggggagtgaccctttgcccgcagctggtatagcacccacttctcccacaacgaggcccacccctgcttcctgttgcccagcgggcctgtgttccttcacctgtccccactgctggcaatgcttgagccaggggcccttcagtggatcgactggcctggtgacatggacctcagaggctgacctccaggattgtgaactctgcccctggttctttcccaggagggtccagacccccaagggagcttctaggatctcccagagctcttccagactgtgggtaatgggcaccacactgaggggtgggcactgcaagagacaaaatgtcattgcttttaagggaagttttcagttttctcttgtgtccttccgaggtctgagagcctgggagacctagggctgggaacacaccccctgggcaacaatgaatccttatgcccctcccaaactttttgcctcctctccccagggtgagaaaatagcccttagaggccccaagggaccagaataaacacacttaacaaagtaatccatatcttccacctgtttgatgcccccccaacccacacagatctccccttgaaaattttactgccctagccagattttcttcgtcctgtcatttcttttaaaatttattgttcttggccaggtgcagtggctcacgcctgtaatcccagcactttgggaggccaaggtgggtggatcacctgaggtcaggagttcaagaccagcctgaccaacatggtgaaaccctatctctactaaaaatccaaaattagccgggtgtggtggtgcatgcctgtagtcccaactacccggggtgctgaggcagaagaatcgcttgaacccgggaggcagaggttgcagtgagcagagattgcgccattgcacgccagcctgggcaataagagcaaaactccatctcaaaaaaaaaaaaaaaattatggttatttaagaaatacaggccgggcgtggtggctcacacttgtaatcccagcactttgggaagcagagatgagcggatcacgaggtcaggagattgagaccatcctggctaacacggtgaaaccccgtctctactagaaatacagaaaaattagccaggcgtggtggtgggcgtctgtagtcccagctactcgggaggctgaggcaggagaatggcgtgaacccgggagacagagcttgcagtgagctgagatcgcgccactgcactccagcctgggtgacaaagtgagactccgtctcaaaataaaaaaagaaagaaatataatgatcagtagctgcaccactagaaagatggcagagcaagagcacagaaaaattcctttggttccagaaaatctcctgaaaaataggaaggcttatcaagccctcaaagccacccaggcaaagcaggcatttttggcaaaggagcagaggaaaggaaaagggctcaggtttaagtgactggaatcattcctacatgattcctggcaggagaaacgtgacaaggtgcatctcaagacaactagaagtgcaacctcacgccttggaattgccggataaatgttccttggcctttgttgtacgcatcaaaaggattgatggcgggagtttactggtgcagagaaccattgcaagactttgcctgaagaaaatttttagtggtgtctttttaaaaatgctgcgtatagtggaaccttatgtgacctgaggatttccaaatctgaagtctgtctgggaattcattttgaaacatggacaagccaaggtcaagaataagaccatcggccagacgcagtggctcacgcctgtaatcccagcactttgggaggccaaagatgggtggatcatgaggtcaggagatcgagaccatcctggctaacacagtgaaaccccgtctctactaaaaatacaaaaaattagtccggcgcggtggtgggcgcctgtagtcccagctacttgggcggctgaggcaggagaatggcgtgaacctgggaggtggagcttgcagtgcgccgagattgcaccactgcgctctagcctgggcgacagagcgaaactctgtctcaaaaaaaaaaaaaaaaaaagaataagaccatccctctgacagacaacacagtgattgaggaggacctggggaagtttggcgtcatttgcttggaagacctcattcatgaaattgccttcccagggaagcatttccaggagatctcatggttcttgcgccctttccacctttcagtggcccgtcatgctaccaaaaatagagtgggcttcctcaaggagatgggcacacctggctgtgggggttaacgcatcaatcagctcatctgccagctgaactagacccaggtgccaaaccgcagtaaatttttatcaatgaagtggaagcatgtgtttttgttgttttgggaatttttatcaagtactttcagagaagattatttcctgctttatcttcaaaaactggaaagggtcaaagaaaagacagtagcttgctgggcacgatgcctcacgccagtaatcccaacactttgggaggctgaggcgggcgtatcacctgaggtcaggagtttgagaccagcctgaccaacatggagaaacactgtgtctactaaaaatacaaaaattagctgggaatggtggcgcacgcctgtaatcccagctactcaggaggctaaggtaggagaatcactcaaacctgggaggcggaggttgcggtgagccaagatcgcgccattacactccagcctgggcaaaaaaagtgaaagtccgtctcaaaaaaagaaaaaaaagacagtagcttatgttcatggcaagcacctctcatcacagtccagttccaaggaaaaattccagcgttttctacattgggtgccacgtcgcctgaaatcagcacattccatggaggaagtagtacttctctgttgcatctatcctagggtttaatgttggtaaatgagtcactctagcatttgcacaaggctccttaagactcctgcagcagtcgaccaagcccaaggacataattgaatctggagagtcctggggccttgttttgaaaaagacttgaaatacacataggaagaaagacataaaaataaatgttcacttgtctctgcaaaaaaaaaaaaaagaaaagaaatataaaagcacctggcttcagccactttttctgactgctctctcttgtgaagatgcctgagtacatgtaaaacaggtacaatttgtattctttcctcctgttagtctgtctgctgtcgattcattttttcttatttatttttgagatagggtctcctaagttgagcaggctgatctcattctcttggactcaaggaatcctcttgccccgacctcccaggcgccaggattacaggcgattctcaatctgggcctagattcaactaaagaacccactaagagctaaaaggcgcgttggaggtgactctgactccagtacacaggacatgtatgaagtcacgtggagcacagagtaggccatcaggaagtgtgagaaggaggtctcaggggagagctggcgacttttactgagataaagaccccaggggaagcaggttggggtaagaaagggatgagctgggtttgagcctaggagccttgggccatccgcgcaggggcaggacgtcagggaagccaagagcctggctgcagctagagggagacaggcggtcgggaggcgtcctgcacagcacatgggagaagctcctagaagagagggccctctgactttctcagccttaccctattctccccgctgcttccgccatctagaagctcccagaatttcaagctccaaaaagcctacaatagaggaggttctcctgtatccactccatggcttttgtgaaaggaaaataaatcttgggacccccccaaatcactacgctaaaggaaaaagtcaagctgggaattgcttagggccaacctgcctcccagtctattcaaagtcacccctttgctggctgacacagatgcatatctgattgcctcctttggaaacgctaatcagaatctcaaaagaatgcaaccgtttgtgcctcaccttctgtttcttggaagcccccttcctgcttcacgtcttcctgcctttgcttcaagttgccccgcctttccaaacagaaccaatgtacttcttacatacatttattgatgtctcatgtctccataaaatgtataaaactaagctatgcccagaccaccttgggcacatgtcgtgaggacttcctgaggctgtcacgcgcgcgtcctcaaccttggcaagtaattgagatctgtctcggaatttctgggttcacactttttgctctcaacattgggaagaggctgctgtcgccgtttctgaggacaaaacgagacagtgatgggctgaagtccgattataaaaaggtccagagacgaaaactaacttctgagttcacgagggctgccttccgcagggcgctgctttgttcccgcaaacccgggcggaagctctgagctgcgccgcctcacctggcggggccggagcatgcgcggctggttttcaaggccggcgcctgtagccgcaacggccattttggattagggcaaggagagaactgggcctggagcgggggcgcggggaggggggcgtcgtcgtgggtacaattgcgcaggggcaaaggtcgagaggtcgcgctgccgccgttttatttgaagacatcgtccagttctgaccatggactcgcagccatcggcccttagtttccatcccctctagtgggccttcgggggctctactgacgtccctccttcccttggtaccgggccggggaagtgttctcgggcgcgggaggttccgcatgcccaggcctggccaggggagatgaccgatccgtcgctggggctgacagtccccatggcgccgcctctggccccgctccctccccgggacccaaacggggcgggatccgagtggagaaagcccggggccgtgagcttcgccgacgtggccgtgtacttctcccgggaggagtggggctgcctgcggcccgcgcagagggccctgtaccgggacgtgatgcgggagacctacggccacctgggcgcgctcggtgagagccccacctgcttgcctgggccctgcgcctccacaggccctgccgcgcctctgggagctgcgtgtggagttgggggccccggggccgggcaggcggcctcctcgcagcgtggggtttgcgttcttctcccccaggagtcggaggcagcaagccggcgctcatctcctgggtggaggagaaggccgaactgtgggatccggctgcccaggatccggaggtggcgaagtgtccgacagaagcggacccaggtggagtatcgggtgctcagtcccatggggacttctctgttcctgtcccatcccggtaccctctgccacctccagctacctgcttagcagtttcctctctgaactgcctcctcaactgcggccaggaggctgagcccctgcctggctccgggatgcagcctagaaaggggctgtgatgggggctctggccctgccatacccgcccctgagtcctcacctctgcgtggtcactacactccggggacttttttgttttgttttgttttagagacagggtctctgttgcccaggctgaggtgcagtggcgccatcatagctcactgcagtcttgaactcccgggctcaagcaatcggctcaaccaatcctcccgcgtgggcctccagagtacctaacactgtaaaggcactcgccaccacgcctggctggttttttttttttttttttaattaaaaaaattttaaagaggtagaggtcttggtgtgttgcccgagctggtctcgaactctagcgatcctctatctcggcctcccaaagcactgggattacaggcatgagccactgcacccggcctctaggttctgttgactctacctccacatcatgacccgctccagtcgttttcctgcactatggttcctatgcccccacatcccgccctcccatttccttcctttagttcttgcctcagcttttgcagagtatccagccccactgaacttggccatgccctcctggttctgcctttcttggtgctgttccttctgcctggaatatccccaggtgtccgcttcttattccagatcaggcccagatgttcacgtcatctctgcccttcccccgcggtgacatttccccagcccggaggcggaatggactgttccctccctccaggctctgtctggctctgcagccgaggaacaggtgtcactcctccatctcctaggagcagtcgggggtccagcaggcctgtccctgtccacgcgggctgtgggattcaatgaccaggatgagccaagcctgaactctcgcctccttatctttcagcagattccagaaacaaggaagaggaaagacaaagggaagggacgggagccctggagaagcccgaccctgtggccgccgggtctcctgggctgaaggctccccaagccccctttgccgggttggagcagctgtccaaggcccggcgccggagtcgcccccgcttttttgcccacccccctgtcccccgagctgaccagcgtcacggctgctacgtgtgcgggaagagcttcgcctggcgctccacactggtggagcacatttacagccacaggggcgagaagcccttccactgcgcagactgcggcaagggcttcggccacgcttcctccctgagcaaacaccgggccatccatcgtggggagcggccccaccgctgtcccgagtgtggtcgggccttcatgcgccgcacggcgctgacttctcacctgcgcgttcacactggcgagaagccctaccgctgcccgcagtgtggccgctgcttcggcctgaagaccggcatggccaagcaccaatgggtccatcggcccgggggcgaggggcgtaggggccggcgccctggggggctgtctgtgaccctgactcctgtccgcggggacctggacccgcctgtgggcttccagctgtatccagagatattccaggaatgtgggtgacggcctaaaaagtgaccatctagacattgtgggcggcccgagatgggctcaggggcccgaacctctgcagcggcctgcagggaggtcccagaatccaccgcaagagctggcctggggtgcggacagtctgatcttgggctctcagcagcctcttctgccagcaccttgctccccgctgccctgggctctccaaggccccctttgctgaggcagggctgaggtgagaaccccccagacctccatacagggaagcaaaagctgtttctcctcccagagatgctaagaggattgaggtagagaagaaccttgttttctctgttgtctttttctttttacttttttaattttttgagacggagttttgctcttgttgcccaggctggagtgcaatggtgcgatctcgactcactgcaacttccacctcctggagtcaagcgattctcctgcctcagccacccaagtagctggaattacaggcacctgccactatgcccggctaactttttgtatttttagtagagatggggtttcaccatgttggctaggctggtctcgaactcctgccctcaggtgatccacccacctctgcctcccaaagtgctgggattacaggcgtgagccacctcacctggccttttcttttttattctttgaccttcccacaagacaatacccattgtctgttttttttgtttatttatttacttattaagacagcatcttgctcctcacccaggctggaatgcagtggtgtgaactgggctcactgcagcctagacctgctgggctcaaggaatcctcctgccccagcctctcagatggctgtgactacaggtgggcaacactatgcctggctaatttttaaatttttttgcagagatggggttcccactatgttgatcaggctggtctcaaactcctcggttcaagcaattcgcccaccttggcctcccaaagtgctgggattacaggggagccactgcactggccttcattgtctttttgctgcacaacctaaaaaaccagtgaccctgtattggatctcgcctgcagttgctgtattgatttgggcccaggcagtgtttttaagtgataagaattagtgatgaagatctaaagggatattttgcaccaaaatccaggtttctggcatctcttgaaaaatccaaagatttcgcaagttcacctaggctctcagaaagtcgcagttgttgggagttgggccggagccagaactcccaacttactgtggtccggccactcatcccatcagctcctgaccaagcatgagtagccattcatcatggcttgcttttagtgtttttggtgtttatcttaaagtacagcaaagaagaaagggaagtatttcttgaacccatgtctgtgtcaaaacagtccttgcatctttcctgtctttaggtacgcaccatctttgctgtctttaagtatgtgccatcatgggcagagggggctaggccaggaacacctggtgttagatttgtagccagtggcaaccgtacccatctgtatccccaagttctacacggaatccctccagcacttcacgactccattatccagctaccactaattcctttgtgggcagagtccagccacgggcagcccctgccctgcctctggtcaggacaacacctgcccaaggagagcaagggcctgtgacctctgctggcctgtgcgccctcacctgtcacccagctcagccctgtgtctggcctacccagggaggaaggaaccagatttatcagcctgaaaggaggtagaagttttggagaaaagacactgttcgggtgtcaagtaatgaactgactttattcgaacctcatctccaatccaatcccaccgtggtctctctctccctcagcttttctggggcgggttgactcgtgtgtcactttatcacaggggcacatggggtgagaagaggaaccttggcagtaggagatacctttgtaccaggttttaatttccagtgtacatctcagtcccctcccctaaccctcaacacagcctggggaaagcccagcttgcaacaccagttctcagcccagactgacagccagatagatcttggccctgagtttgccaattaaagatgccgtgattattacctagaggtctctgagagctttgaagtttgtaaagtttacttatggcccagaaaccaggctccaactcctctgcttcctgccctcatgacccaaccttccagcatttcgtcaattttttttagtgtcgtgaaacccttaagccttagccccaccccattctcagctcctcagttggtggcacagatatttccacctagaggtagggccaggctaagtatcttttaaaaatgtagctattctcggccgggcgtggtggctcacacctgtaatcccagcattttgggaggctgaggcgggcggatcgcaaggtcaggagaccgagaccatcctggctaacatggtgaaaccccgtctctactaaggatacattttaaaaaaattagcctgacatggtggcacgtgcctatagtcccagctactcaggagggtgaggcaggagaatcgcttgaactcaggaggcagaggttgcactgagcagagatagcaccactgcactccagcctgggtgacagagcgagactctgtctcaaaaaaaaaaaaaaaaaaaactagctactccctgggcccagttcctcatctattgaatcagaatctccagggatagaattttatggctgtgaaagtttgagagaaccacggctgggaacaaaacattattttcaaactgctcttagttttgcaagagtagtggttggtcccagggcctgtccccaatgtcaggcatacacaaagacctccatttctttgttctttccaaagggccctgtgccgtggctgctgtcttcctgggtacttaggatcatgttcaatacactggggcatctcctctagcatcggatggaagggctttaagagggcttgtcctttgcatgagggaagggagcagtgcatacggaagctcctctcactgagaacgtctgtgaaggctctctggcctgcagtgttggccaggttggctgaccataagccttggctgcacactgaatggctctgccctagtgctgggcatgccaggagataatgctgtgaacaaagtgaccacctgactcaggacatgcacagggctcatcctcatggatgcagaggcaggacaatgccagtggactccccaagtttctcctgccttggattagctggtgttgggtcaagatgcagcccttatcagaggctttcctgggcttggagcctctcactgctgtggctgtgtgtcaggtggaggctggcttccttgtgaagtccctgtgcatagatggcaccctggtcctagaggaggctggctggaagtgagccactcttactccaggtgccagtgaggctgaatttgcacttggaaatgcgggtgcctgggcagcatgaagtcttggcccagcttctgctacacctgggacttgtggctcatgataagagtgcaggcagtgtacggtgtcagagctgtggctggaggtctcgccacccatttttagggtgtggctgctctcctgtgtgaattttggtggatcagcaagttggatgtcagagaaaagtgtcttgtgaaggagacttgtttcctacctgtgtgagtgctttggggatgaccagagggtaccccatgtccagctcttcccaaaactggtcctcttgtaggctgtttgactgtgggctctagtgctggaccatgtaagccattcttagcaaaggtttcaagacaaacatacattgggatgggagagagctatggggctggaagctgtttctctggagggcagaaagttttccccgcttcattcgtggcataagctcttgtgattttatttgtaagcctttattattattatttgagacggagtcttgctctgtcacccagactagagtgcagtggcgagatctcggcttactgcaacctccgcctcccgggttcaagtgattctcctgcctcagcctcccaagtagctgggattacaggtgcccaccaccgtgcctggctaatttttgtatttttttagtagagacggggtttcaccatcttggccaggctggtcttgaactcctgacctcgtgatccacctgccttggcctcccaaaagtgctgggattacagacatgagccagtgcgccccacctgtaagcctttatttagatagtttctctccactttttaccacttggcattcttcaagttcttgttctcacctcttttcaggaaggagaggccatccttcctcccaaacattctcttcccttcatttgtctgggtaggcgacaagaaaacacgatccatggctcctgctcacacaggggcatcgggctcgttaactgtcaagaacgctgccaaacttgtttcagcacgaagcgtagaaaaaaaagacaagaactggatgatattaagttgtctgtccaggctcacttcctcaattcaaagctgcgcccgaggcagtgtttctcaggttcccttcctctgcaagactccattcgagtcagacaagactggagagttgttagatgcctcgaaggccagatggttctctcagtccaattctcctttgtatcaccctcacctggaaggaatcctgcctccctgtgaggaaatctaacaacagggactaaggctgccagggattgagttaaactcaggcgctggggaaggtggaggggagaggcaaggggtgtgaggctgacgaggaggaagggtgtctgtcctcagatcttctggctttcataaaacataatggaggctaagtgggggcgggaaaagttttgatggcacaggccgggctggaggggagatgcctggcacctccctcccactacctcctgaaggcgcttctggccgacaggggaggcggacccgaccacagcactcccggccaatcaggaaggcgcctggcgttccctggcgaccattaacgcccagccgtccgcggggttggaggaggcggggcggctagagcacgagccccatcggccaaccgccgggcttcctggggcggagaagctgtgcctctgggagccggggcggggctgtctccttggcaactatcctagccctcgaggagggaggagggaggaggaggatcaggggagccgagctgggtgggggccggaggaacgggagcgggcgcgcgcaggtgccggggagcggagttcctggagggggtcccaggctcaaggacctcggcgaggccaaggggagtccgtcccggttcccgaggcgctgccggagctgacccggaggcccgggaggggagggagcgagacaccgcccccgctggcgccgggaagcgtcgctccttctcgctgaccttggtctcgcttgtcgcctcgcccttggccacacgcaccgacgacgcggggcccgggagatggacagacgggcctctggagggacggagacctagaacataggcacacacactgccccggtagccccgcgggctccggggcgtccggtcctcacccaccccgtggccgggcccctccagcccagggttaatgccaacgagtttccacctccagcggctcctagagaggccgcggcgcgagccggcggggggacctggccgcggacggacacttcctgtgcgggggagggtgggggggtgctgggcggccgttggacagtgcagcccagcccggggccggggtccagaaggtgggggctcgggcgggagcgggggccgggggccgccggggtagtcgcgaagcccctcatccccgaggccgcgacgcgcgggggccagtgagggccacggggaggccgagaccttgggagggggcggggccgcgggcaggggaggggcccggcgcgctggagaggcgcggggtcaagacgtccggcctcgggggcccgggctgggccgccgagtcccctgggcggcgctgagcgggcgggaggcgggggcccgcggctcggggcaaccgaggccgggtcgcgggatcggccgccatcgccgccgccgctgcactgggagcccgcggggatggagcgggaggcgttgccgtggggcctcgagccccaggatgtgcagagttctgacgaaatgaggagccccgaagggtacctcagaggtgaggagggagcgcccgtccgaggagtggacttgcgcgcaggagaaggggctgtggctccagggagggagcgagggcccggggctgggacacctgggactcgaaggaggggccggcggggactggggtgtcttgggtcagctgaggggggcgtgggaatttcagcacttgtctaggggccagcgaccctgcatgtgaggtgggaggtgtgtggttgctaatggaccaaatgaccttccaggtctcacacgatctggattctctcatcctgcaggcaacatgagtgagaatgaggaagaggaaatttctcagcaagaaggcagtggggactatgaagtcgaagagataccatttgggcttgaaccccagagccctgggtttgagccacaaagcccagagtttgaaccccaaagccccagatttgagcctgaaagcccggggtttgagtcccgaagccctgggcttgtgcccccaagccctgagtttgcacccagaagccctgaatcagattctcagagccctgagtttgaatcccagagccctaggtatgaaccccaaagccctggctatgaacctcggagccccgggtatgaaccccggagccctggctatgaatctgagagctctagatatgaatcccagaacactgagctcaaaacccaaagcccagaatttgaagctcaaagttccaaattccaggaaggtgcggagatgcttctgaaccccgaggaaaagagtcctttgaatatctccgtaggagttcaccccctggactccttcactcaggggtttggggagcagcccacaggggacctgcccatagggccaccttttgagatgcccacaggggccctgctgtctacaccgcagtttgagatgcttcagaatcccctgggtctcacaggagcccttcgaggtccaggtcggcggggtggccgggccaggggtgggcagggccctcggcctaacatctgtggcatctgcgggaagagcttcgggcggggctccaccctgatccagcaccagcgcatccacaccggtgagaagccctacaaatgtgaggtctgcagcaaggccttctcccagagctctgacctcatcaaacaccagcgcacccacactggcgagcggccctacaaatgtccccgttgcggcaaggccttcgccgacagctcttacctgcttcgccaccagcgcactcactctggccagaagccctacaagtgcccacattgtggcaaggccttcggcgacagctcctacctcctgcgacaccagcgcacccacagccacgagcggccctacagctgcaccgagtgcggcaagtgctatagccagaactcgtccctgcgcagccatcagagggtgcacaccggtcagaggcccttcagctgtggcatctgcggcaagagcttctcccagcggtcggcccttatcccccatgcccgcagccacgcccgggagaagcccttcaagtgccctgagtgcggcaagcgctttggccagagctcggtgctggccatccacgcccgcacccacctgccaggccgcacctacagctgccccgactgcggcaagaccttcaatcgctcctccactctcatccagcaccagcgctcccacacgggcgagcggccctacaggtgcgccgtgtgcggcaagggcttctgccgctcctccacgcttctgcagcatcaccgggtccacagtggcgagcggccttacaagtgcgatgactgcggaaaggccttctcccagagctccgacctcatccgccaccagcggacccacgcggcgggccggcgctgacctggggccccagcaggggtgggaggtgtgggcagaagataaggggccagggagctagaggaacctttagggaggatagtggagaagccgcaggagaatggaggagctgaggatgctggaagaagagaaccagggtggaggaagtgacatgccctggagacttgtgggaagtgggttggagggaggccaggccggcagcgggaggccctgggagaaatggagagaggtcagcggagggctggcctcagccgcggctccttggtgggtgcctggcttggcaactgctagagcagggaggggggagggcaggggattacctaattagagtgggttagcttagattggtagctgctgaaactctcgttgagtcaggagcgggtaaaaggtaggtggggtggggagtggggccccggggtggggcctgggcctctgcgtgcaaaccccagcctccctcttcttcctcaggctttggagcccctgagtttgagttcaataaaaactttatgtggtaaacgagacttgtccttaaaatgtgtgcgtgcacagcgccctgggaagtgggagacaccagtagtagcctagggccttatccgggaagtgctttgctgttgctgctgttagaaagcgggtcttgctgtgttgcagcaggccaccgcacctggctggaagtgctatttgtttctttttttttttttcttttttttgagacggagtcttacgctgtcacccaggctggagtgcaatggtgtggtctcgactcaccgcaacctctgcctcctgggttcaagtgattctcctgcctcagcctcccaagtatctgggattacaggcgcccgacaccacacctggctaattttcaccatgttggccaggctggtctcgaactcctgacctcacgtgatctgcctgcctcagcctcccagagtgctgggattagaggtgtgagccactgcgcctggcctgtttttctttttttttaattttgaaggcagtatcttgctctgtggcccaggctggattgcagtgatgcgaccatcgctcactgcagccttgacctcctgtgctcacgtgatccttctgtctcagcctcctgagtagctgggactacaggtacgtgcaaccaggctcaaataagtttttatattttaattttttgtagagacagggtttgctatgttgcccaggttggtctcaaactcctggcctcaaaggatcctcctgccttgggtttccaaagtgctgagaatacagttgtgagccacagagcccagccagaaatgttcacttgagtagggctgcaatattgcaccagcacaaaaccaccacaaaactggacagaatttcacatttattggataaatacatgcaggcactgtgcttggcactggggctccaagttagcagacgtggttcccaccttgagctcagtctttctgtgggggccactgcacaggcgtgatgggtcctgggagagggtgtggagctagggcagggcagagcctgagaagacagcctccaagggtggggatgtcacgggcccgtgcccgctttttatttttattttttccttgagacggagtctcgctgtgttgcccaggctggagtgcaatggcgcaatcttggctcactgcaacctccacctcccaggttcaagcaattctcctacctcaacctcctgagtagctgggactacaggtgtgtgccaccacgcctggattttgtatttttagtagagatggggtttcgccaggctggcctctaactcctgacctcaggtgatccaccctccttggcctcccaaagtgctgggattacaggcgtgaaccaccgcgcccagcccagcccctctttttctgtatcttcccactggctctgtcattaattcagtgaaattatgtcaagcacctactagatgtcccacgccctgacatatcatgaggcatcatcccaaggtgaacaagacaagtatagcctttaccctcacagttcactgagagatagctgctaagtacgtcaatcattaaacagggaaaaaacatccaggctgccggatgaagaaacatgacgtgtgctttgagggagtagtgcaggctggtggaagtgtgaaagatgtgaggacccaaccaagtgtgacgtgagctgggatctgctggtcaaggaaggaggggtggcgagatggaaggttcaggcagagggagctgtctgggtgaatgcaggaagacaggaaggagcctggcctgggagaaaggctggtgtcaccagagcttcaacagggaggcatcacggctctagaagaggctggggaaggccacgagggtctcattttgcagggtgctggaaggcatgccaaggaatttggtctttggccaagaacaaggcgtgtgccacagtcacgtagtgacacaggtcacatttgctttctgccagcagaagagactggactccagtgcaggggagtgtgcaaggacaggttctggggggtggaggcatctgtggacatcccagggcaggggtgagggccagaacatccctaggtcctgagactacagtttctccacatttagatcagacattctcttccaaggaaggaaaccaagagaggctggtgaaccgtctggtaatgacaagccctcacttttgcagccctcttggctggtccctcagcaggtcttccctatgagcctgcaaaggagacaggcaggaatgagttccatgttcgagatagggaaactgagggccagggagaggcagtgactcgcccgagggcacacggcagaatgcaggcagaggcagagtggccctgggcatcctgagtccagttctgggcactctgcacctcacaggcctggactcagtccttgccaccaccactctcagagtccttctcatggaggggcttcaggcagccgggatccccagcctcttgcccagatgccagctgctcagagtcttctgcagggattccattcgggacacctctgccagcctccatcttctccttcaggttccgtttgaagaaaccaacctgtacaaagacaaaatttgaacgagcaaagaattcactgagcactttggccccaagaaaatgtgagaacactttttttttttttgagatggagtctcactgtgttgcccaggctggagtgcagtggtgcgatctcggctcactgcaacctctgcctcccagacttaagcaattctcttgcctcagcctcctcagtagctgggattacaggcatctgccaccacgcccggctaatttttgtatttttagtagagacagggtttcaccatgttggccaggctggtcttgaactcctgacctcaagtgatctgccctccttggcctcccaaagtgctgggattacaggcatgagtccccgagcccagcgagaacactttattttattttatttattttattttatttttgagatggagttttgctcttgttgcccaggctggagtgcaatggcaccatcttggctcaccgcaagctccgcctcccaggttcaagaaattctcctgcctcagcctcctgagcagctgggattacaggcatgcgccaccatgcccagctaattttgtatttctagtagagacagggtttctccatgctggtcaggctggtctcgaactcgcgacctcaggtgatccacctgcctctgcctcccaaagtgctcggattacaggtgtgagccaccgtacccggccttcatctgtaatgtctactcagccttcaaatcccacctcaaatgccacctctcctgggaggcctgccaggccctcacagcctaagtgaggctcctgggttctaggccccaggccacacaggccctttgcagccctcattctgcttgcttctgcctgtgtcctctcttagactgtgagcgccacaatggcagggagcatgtttgtggcatgtgcctctgtgtccctgtgcctgggacagtgcccagcagccaaaaggacctccatatttggcatacttccttttcctctcccaggacgcctcgtcctggctctgccagggatgggctgaatgaccgtggaaaagtctctcttgctgtttgtgtgtgtgtgagacaaggtcttgctctgtcacccaggctggagcgcagtggcatcatcatggctcactgcagccttgacctcctgagctcaagggatcctcccacctcaacctcccgagtagctgggactacagttgggtagcatcacgtccccctaatttttaaaattttttgtagaggcggatgctttccatgttgcccaggcgggtcttgaactcccaggctcacgtgatccacctgcctcggcctccaaagtgctgggattacaggtatgagccactgcacctggcccttgcttgttctttggacctcagtagccttctctgttgaaggagggagtaggctgaggccccctggctctgaggccccctggctcttatgccctctggcttggtattctcctccctggctcccaccagatccccttccccagcctggctgtctcagcaatgcctgtgacccccggaggcacccaccttgtacagcactatgaaaatgagcagcagcagcagcagccccccgatgccgctcagcacgtagaggtagagcatctgcttctcatacaccacgtcaaccttcatgacaacctgggagcagggggaggggagtgccggaaaatgccttttccacccctgaaagtccctgtgaacctggttccattccccatctcctcctatccggactgcatcacccgcctggagtctccagctgcagaccctctccctttaacacgtcacctattgcagtcgctgccatgagttggccaacacacaccttaggcagccctaggccttcaatggcttccccggaatcgcacgcagctcagcattcaaagccgtccagaatccagcttttgcttacctgttagatgcagcttccctcctcccctctgcctgttagccacactgaacttcctgctcttcaaacctgccctgccaacactcaccacagaggcccctggccttgccactgcctctgcttagagcgctctttcttcactgtctgacttggcttggtaactcctttgctaagctgccatcagattgattttttttttttttgagataaggtctcactgtgttgcccaggctggagtgtagtggcataatcatagctcactgcagccttgaactcctgtgctcaaacgatcctcccatctcagcctcccgaggcactgagtacaggcgtgaaccaccacgcctgcctctgacagatccttttgagatgaagtctcactctgtcgcccaggttggagtgcaatggtgggatctcagctcactgccacctctgcctcccaggttcaagtgattctctcacctcagcctcccgaacagctgggattacaggcgcccaccatcatgcccggctaatttttgtatttttgtagagatggggtttcaccatgttggccaggctggtcttgaactcctcacttcatgtgatctgcctaccttgacctcccaaagtgctaggattacaggtgtgagctactgcgcccggcctcgattgaactttactcgacacataagtctactacatctcaggcaactctggggttgtgtgcccaccaaggggagaagaagcttctcccaggctgatggctctggcagtgggaagttctgactcgcacagagcccaggagctctcccacatctaggtctgccctggggctcctgggctccctctgttgcctgttcctggggcttccaaggaggtggagatacctgggccagggaggcgttgctgccatagaggtggaaatgcttgctgctgttgaaggagatggagagggagctgcagaggctgaacatggaagaggcctgtgggagcggggaaaggcgtcagaacccgggagaacgaggacagaacccactggcttttgcccccaccacaacacagtggggaggggcagagaaggggttccaggggggtgcacccatctctacacaactctctattgtggcattcttttctttctattttttttttttttttgagatggagtcttgctctgtcacccaggctggagtgcagtggtgccatcttggctcactgcaacctctgcctcccgggtttaagggattctcatgcctcagcctctcaagtagctgggattacaggcatgtgccaccacgcccggctaaagttttgtatttttagtacagacagggtttcaccatgttggccaggctggtctagaactcccgacctcaagtgatccacccacctaagcctcccgaagtgctaggattataggcttgagccccgccccagcctctactgtggcaccctaatatgtcgctccccattgttgtaaggaaagcttttctataaagaacacacaggaactatccataggcccatggaaacagcattgcaaatatcacagaaatcattgttctctttcacctgtgactgtgtaaatgggatttttcatcaagatggaaaacaaaaatggaggcagactatctggtgggagcccacccacaacggccccaggcattggggcccccacagcagctccacatctcttaggagcggggactacctcgatctctcccaccagctccagagtcccgatcacttggacgaggatctcctgcctgaagacaacagggcagcggaacagggctccggggagacaaggctgacaaggatgaggaaagcggggtcagggcggcttcattccgacccgtgtaccgcccagccccaccgtctctcagctcacacgcccatacctcagctgcatccgggagcctctccagatcctcatagtggcagggcacgggaggctcctaggaacaagcggcaggtcttcagttagagcctccccaacccagataagacactggcatcccagctttcccctgccctggccctggccctgggtgagttcagacatctctgagtccagcaggacctgaattcatccatccttactctccatacacccagccttgcccccttgatttttttttctttgttagagacagggtcttgttctgtcaccgaggctggagtgcagtggtgccatcatagctcactgcagcctcaaactcctaggttcaagtgatcctcccgcctctgcctcctgagtagctgagaccacgggcacgggccaccatgcatgcctggataattttaaaatttgtttgtagagactggagttgtgctatgttgcccatgctggtctcaaaatcctggcctcaatggattctcccacttcagcctcccaaagtgctgggatttgggaggcagagccaccgcacctggccaagccctgccctctgtaccctcaaatgcactcacccccaagacctgaggagggtagaccctccctctacaggcagcactcaccatctgcacgctccactggtgtgtgatgggcccctcgctgggaggctgtggcaccccaaccacagcctccagggtgggtatgttgtggtcgtggatggaaggctggatcctcacctggcacagaggacaagggatgcagagccctgaatgccagccaccccagctgccccccagaccctgtgtgcccttgcacgcctcttccagtcctcattggctgagtccccagggcccttgtcggttaggcagtgtccagtgactgggcatggccagcttccgtcctcagggccttgcagtgtggcttccatgctcttccagctttctccgcccagcacactctcacacaccctgcaagggcctgctctaatattatctctgaaggcttcgctgactccccaaggacagggcagctccccctcctgggctcccacagtgtgctctgcgtccccagcaggacggcaaaggatctgcttggatgtctgcatctccactagaccatgaactccctgaggacaggagccattcttactccacctccaatcccctactgcttgacacagtgcctagtgtggtggctcacacctgtaatcccagcactttgggaggctgaggtgggcagatcacttgaggtcaggagtttgagaccagcctgaccaagatggtgaaaccccgtctctactaaaaatacaaaaattagccaggtgtggtggcacaatcctacagtgctgggtactctggaggctgaggcaggagaattacttaaacccaggaggtgaaggttgcagtgagccgagatcatgccactgcactccaacctgggcgacagagtgagactccgtctcaaaaaaaaaaaaaaatttctgagcaccttttattaaaaaaagaactacctgtgttaaggctgggagactcagatatgtgtaagaaagtgacacagaagtggcactaacaatgtctcaggaagcagggaaatgtatcaaattagaaggattctatcatttattcattcaacgaacatttgtggacacttgaaataccagttaaattaaaaaggccaaatgtcaggggcagtatttgaatttgactgtgaaagatggacaggattttttttttttttttagacagaatatcactctgtcacccaggctggagtgcgatggcacgatcacagctcgctgcaaccttcaccttccaggttcaagcgattctcctgcctcagcctccccagtagctgggactacaggcacacaccaccacacctagctaatttttgtatttttagtagagatggggtttcatcatgttggccaggctggtcttgaactcctgacctcaggtgatctgcccacctgggcctcccaaagtgctggggttacaggtgtgagccaccgcgcctgaccagatggacaggattttaacagatgaaggtgggagagggcatccaagaagagacatgtggggagccaggatggcaccaggtgagagggatgtggctggaaggagggtgcctgggaaggagaacaggagctgaggctggaaaggaagcccaagatcacactatggggcctggaaggcttgagagtgaggagttggagcagcatcaaggaggcagtgggaagtcacagaaggtggcagaggaagagagtggctccagggaggtccatcccctgcaggcatgagctggaaagaggctgggagaggcgggtcatggcccatgttgggagcctctctcaatagtccagttgcaagaaggtgaggaattgggtctgggcggtagcagaaaaaggacacagacaaccagactccagcaggcagtgggacaaagcaggaggaaggagaaattcacccagacacgttaagttttccttgagaaagagatggtgctttcaaaagattccacgcaagccagaggagatgctggcttaggggaagacagcaaatttggtttagaatatgttgagaccaggccaggcacagtggctcacgcctgtaatctcagcactttgggaggccgaggtgggcggatcacctgaggtcaggagtttgagaccagcctggccaacatgatgaaaccctctctctactaaaaatacaaacattagcctggcgtggtggtgggcgcctgtaatctcagctactcagaaggctgaagcaggagaattgcttgaatccaggaggcggaggttgcagtgagctgagattacgccactgcactccaacctgggtgacagagcaagactctacctcaaaaaaaaaaaaaaaaagaaaagaaaaaagaaaaggtaaaaataaagcaccaggcacagaacctgggtttggagactgggcaggatgccagcacctagctaaatacctaacttagaataggccaggtgtggtggctcatgcctgtagtcctagtactttgggaggctgaggtgggtagatcacttgaagtcaggagttccagaccagcctggcctacagggcaaaactccgcctctacaaaaaatacaaaagttagctgggcatagggccgggtgcggtggctcatgcctgtaatcccagcactttgagaggccgaggggggaagatcacgaggtcaggagttcaagaccagcctggccaacatggtaaaaccccatctctactaaaaatacaaaaattagccgggcatggtggcacatgcctgtaatcccagctacttgggaggctgaggtaggagaatggcttgaactcaggaggcggaggttgcagtgagctgagaccgtgccactgcactccagcctgggtgacagagtgagactccgtctcaaaaaaaaaaaaaaaaattagctgggcatggtggtggatgcctgtaatctcagctacttgggaggctgagacaggagaattgcttgaacttgggaggcagagtttgcagtgagccgagattgcaccactgcactcaagcctgggtaacaaacagagcaaagaatagtagctcattcagtgttgttatgaaaaagcaggttctctctcagcatcctccttgctctcaagtcctgtgattcttgaaataatgcatccagtggcagaaaggagttagcatatgctgctgctggaagcctgtaagtggaggctgtgacactctagagaaaggattattgaacagttggatggctaggatgagtactgtgtctacttggtgcctgcatcctcagtccccgggataaagaatgaatgtgtgacctataaggaccttccacattgggattcatacctggtacatgtgcttgacttggtggatcttggggcctttgggggtgaaactgacatagagtgtggagtcttcttggctgcggagagagaagggcagcgatggaagaacgaagtgacagcaacccgggctccaggaagcttctgagcgcccagccactgtgctaggaacggcacagataccatctcattcaatccctaccacaacctgctctttcccagaaactaaggctcctggacagggccagcctcttgtccaaagcttctccacagtggagagacaggactggagcccagggaagtgtgtccagtggaggctatgtcctccccactgcgcgccacctcaccagtgtctccactgtcctctgggccctgctcatctcctagataatcgtatccactgctgatgcccctcgcacccatccttccaacacacactgctgggtgaccttcccaacatcactctctagtcctgccactcacctgctcagcattagccaacggccccctactgcgagggagggtcaggtccaaagcctcccatgtccaggcagtctcctcactgctcccctgcacacacctgcccttggctaatcctgcccaatccctgtcccccaggtatgccccactgcttcctccctccttgcctttgtctgggccatggtctctgatgaggacatctaggttcctttttagctcttcccctaatggcctcatcctccagaccccagtccaagccgcactttctccacgaactcttccatttctcccccaacccacactcatctttcctggctctaatttcatgtcagtatcatactgtgtggcattgatgttcaaaagcactggaggccaggcgcggtggcttacgcctgtaatcccagcacttcaggaggctgaggcaggtagatcacctgagttcaggagtttaagacctgcctggccaacatggcgaaaccctgtctctactaagaatacaaaaattagctgggcatggtggcaggcacctgtagtcccagctactcgggaggctgaggcaggagaattgcttgaaccctggaggaggaggttgcagtgagccgagattgtgcaactgcactccagcctgggcaacagagcgagactctgtctcttaaaaaataaaaaaaatttaaaaagcactagagacctgagctcagacactgtccccgtccttctctgtccttctgtaactgagccaactggaaaaagccactcgattttgagtttccttttttttttttttcacacagggtctcactctgtcactcaggctggagggcagtggcatgatctcggctcactgcaacctcctccacccgggttcaagcaattgtcctgcctcagcctcctgagtagctgggattataggtgcctgccacaacgccgagctaatttttgtatttttagtagagacaaggtttcaccatgttggccaggctggtcttgaactactgacctcaagtgatccacccaccttggcctcccaaattactaggattacaggtgtgagccaccacacctggccaagtttccttttctataagcgagaagacctgtaacaggtttttttgaaatagcaaaaaacggacataactccctccatttttgttgaagaggcctttacccattcctgcccataggctaggataattttagagcactgagataacatgcaaaaacagctatcatgtagtttttaaaactaagtctggcattaaaggggacgtttgtaaacaactaactatgttttgttaaagatttatagaagcactgtgacctgaccaaggaccaagaagttcccaacctccttgtatcctctctggtgcccagatgtctgtgctaagttacctcttgatcttaacccctttctcttccccctacccttaacattacagatggtcctttagaacactagttcactgtcttctcaattgcctggctttccagataaacctgcctttcctcccaccaactcttgcttcttaagtctggctttcaagtaacaagcagccagaccagagttcagttacaaacccaactagcgatccccatggttccttcctgctactgtgttctgagagtcactgactctgtgtgtgcatgagtttgggctctcccacttgactgtaagctccctgagggcaaggggtattgtgataacttttctcctatctctcctggcattatcggcccccaggaggggagagaatctagggtgactgaaacagtcaggagcttggctgggcctttggagtcagacaggctgaagctcagaccctggctttagtacttccagctattggaccttgggtaagtgccggccttctctgagcctcagcttgttcattggtaaaatggagagcggcacagctgcctcacagaggtgctgagggctccaggcaatgtcagcaactgcgcagtgcagctggccctcagtctgacataaaattagtgttcaatgagctttttcttccatcagtaaatgctaatccttccctgagctcttccatggccctcacattttggaatgttgaaaacttttggggttgtggctggaatcagttctaattaccccaaggggctctaagaaaggaaggaggttcagaaggagagccccaggagcaaagtcggggccctgggttgggaggctgcggtgggaggagagggttggctgtctgctgggaagaacttactcctggatgaggatgttgatggggtacaggatggggatgatggtagtggctgagttgtcctccaggaggtctgagtcctcattgttactgcattggggcaaggaagaggccagtgttaggagaagggcttggccaggtctgagaccatggcagggatgtgggcggggcctgctcaccaggtcacattggcgtgcaattcaaccgagtccccccaggagctgtttaccagtgtattaaacatcatctgcagagcaacctggcaggaaaggagagggcaatggaaatggaagggtcatgaggagcagcctcatggcccccacatctaatcaccatcatctcagggaccccttatcaagtgctcactgcaccccaagcactgagctaggattctacccattgcaaagatgaggcaaccaaggctccagacggttaagttatgtctataaggtcacaaaatgaataacccaatcccagctttgcctgattctaaagtccaggctctcaaacatgacacagaacagattcacatacatttctcttaggtaggggcaaggtacacccttcttgacaatcacctgctcccttctcctgagccaagagctccctgccctccaccagctcagggcccctaggctgcttggtccctggagacttgaagcactcaccgagtggcctgctttgaagatgggagagctcacattgcaagataatgccctggacagaagcctggactcttcaggaagctcctcgcagctcacaggtatctggctatggggctgggagtgaaaggaggaaacaagtttgttaatgagcaaggccaagtttcccccagaggccaccagccctcctggcctacctcccccaggggctctgtccctgtcatggaaccttctcagcgggaaagggcccaagaatcagggctgcagacagaggcttagtacaaaatagtcactggaaggctgggtaaggtagctcacacttgaaatcccagcactcagggaggctgaggtgggaggattacttaaggccaggagttcgagatcagcctgggcaagagtgagaccccatctctattaaaaaaaattttttttttttttaaatataggatcttactctgttgcccaggctagagtgcaatggtgcgatctcgggtcactgcaacctctgactcgcaggctcaagcgatcctcctgcctcagcctcccgagtagctgggactacagggatgtgccaccatgtccagctaatttttgtatttttagtagagatggagcctgtgtatgtcactcaggctgctcttgaactcctgggctcaagagatctgcctgcctcagcctaccaatgtgctgggattataagtgtaagcctctgtacctggcctacaaaaaattttttaaaatgagctgagcatagtggggcgtgcctgttgtcccagctattaggcaggagaatcacttgagcccaggagtttgaggctgcagtgggccatgcttatgccactatactttagcctgggcaacagagtgagaccttatctcaaaaataaaagttgggtgtaggggggtaattgcaacactatttataatactgaaaaactggaagtgctcaaacaggtcaaagagataacaacggctcagtaaagtgtggtacaatcaaagaagagactatcgtgaagtttttaaaatgccactacctctatacattcagtaaccatttaaaaaatgagcctgatcctgggctaagcattattaaaccattcatcttcatcccaattttgtaaaggacagatttcagtctcagactgggaaggaaacagataaggaaatacaggttcagggaggctaagggactttcccaaggtgtcataactgggtaacagtagggatccgtaagaacttgaacacagaactgtttgactccagttattttctctctctctctctcttttttttttttttttgagatggagtcttgctgttgtcacccaggctagagtgcagtagagtgatcttggctcactgaacctccacctcctgggttcaagtgattctcctgcctcagcctcccaagcagctgggattacaggcacatgctaccacacccagctaatttttgtatttttagtagagatggggtttcaccatgttgccccgtctggttttgaactcatgacctcagatgatctgcccacctcagcctcccaaagtactgggattacaggcgtgaaccgccacacccagcccagttttttttttgttttttgttttttgtttttcctgagacaaggtctcgctctgtcgcccaagctggagggcaatgttgtaatcatagctcactgcagcctcaaactcctggactccagcgatccacccacctcagcctcctgagtagcaggactacaggcacaccccaccacacctggctaattatttaattttgtgtagagacagagtattgttctgttgcccaggctagagtgcattggcatgatcatagctcacagcggcctcgaactctcgggcttaagcacttctccacctcagcccccaaggtagctggaattgcaggtgcgcaccaccacatccagcaaagaaacatttaatgttgctgtataagaataattcggttgggtgcagtggctcacgcctgtaatcccagcactttgggaggccaaggcgggtagatcacctgaggacaggagttcaagaccagcctggccaacatggtgaaaccccatctctactaaaaatataaaaattagctgggtgtggtggcaggcgcctgtatcccagctactcgggaggctgaggcaggagaatcacttgaacctgggaggcggaggttgcagtgagccgagattgcgccattgcactttagcctgggggacaagagcaagacttcgtctcaaaaaaaaaaaaaaaaaaaaataggccgggcgtggtggcccacgcctgtaatcccagcactgtgggaggctgaggcgggtggatcatgaggtcaggagatcgagaccatcctggctaacacagtgaaaccccgtctctactaaaaatacaaaaaattagctgggcgtggtggtgggcgcctgtagtcccggctactcgggaggctgaggcaggagaatggcgtgaacccgggaggtggagtttgcagtgagccgagatcgcgccactgcactccagcctgggtgacagagcgagaccccgtctcagaaaataaataaataaataaatttaaagaaaataaaaaaataaaaagaataattcaagtgttcattgacagataaataggtaaaatatggtctatgcataaaatggaatattattcaaccttaaaaaggaaggaaatttggccgggcacacttgttcacacctgtaatcctagcactttgggaggctgaggtaggcagatcgcttgagctcagaagtttgagactagcctggggaacatagtgagaccctctctctatttaaatttttttttttttgagatggagtcttgctctatcacccaggctggagtgcagtggcacaatcttgactcacagtagcctctgccttacagattcaaacgattctcctgcctcagcctccctagtagctgggattacagccgcacaccacctcgcctggataatttttgtgggttttttttttgtttttttttttgttttttttttgagacggagtttcgctgtcgcccaggttggagtgcagtggcgcgatctcggctcgctgcaggctccgccccctggggttcatgccattctcctgcctcagcctcccgagtagctgggactacaggcgcccgccacctcgcccggctaattttttgtatttttagtagagacggggtttcaccgtgttagccaggatggtctcgatctcctgacctcgtgatccgcccgcctcggcctcccaaggtgctgggattacaggcgtgagccaccacgcccggcccatttttgtatttttttagtagagacagggtttcaccatgttggccaggctggtctcgagctcccgacctcaggtgatctgcccgccttggcctcccaaagtgttgggattacagttgtgagccaccgcacccagcctgagagggtaaacctggtacctcggatcatacagctcgaggctgggaacccagatatgaccctaagacccctgtccacccgcagctgcccatgtgttcaggctgtcctggctgcctggggctcaaagaagggggcagtgtctgccgaacagatgcccgcaggcaggcgctgtcctctcacccaccttcagcatctccaccttgcggaaggagagtcccggggggaagtgcaggtccagctggacccagtaagcatcttcttccaagttactcaggctcagctccacagagaggctggcaaaagcagttagacgcagggctctggatctgtgggggatgatcagggaaagatggaggagggaggatcagggtggggaatatcagaactgagggatctggtgggccagaaagaaataaatcaaaaccaatcatcttttatgctcagtcttttttttttttttttttttttttttttttttttttgagatggagtctcactctgtcacccaggctggagtgcagtggcgcgatcttggctcactgcaagctccgcctcccgggttcacgccattctcctgcctcaacctcccgagtagctgggactacgggcgcccaccaccatgcccggctaattttttttttttgtattttaagtagagacggggtttcactgtgttagccaggatggtctcaatctcctgacctcgtgatccgcccgcctcggcctcccaaagtgctgggattacaggccaccgcccccggcttttttttttttttttattgagacagaatctcactctgtagcccagactggagtgcaatggcacagtctcggcttactgcaacctccacctccagaattcaagcaattctcctgcctcagcctcccaaatagctgggattacaggcacgtgccaccatgcctggctaagttttgtattttcagtagagacagggtttcaccatgttggccaggctggcctcgagctcctgacctcaggtgatctgcccgccttggcctcccaaagtgctgggattataggcgtgagccaccgcgccaggccatgctcagactttcagttttacaattcttgcaatctcatttactgatgactgataggagttccatgagggatttgctttttattttatttgctttttattttttagagatagagtcttgctctgtcacccaggctggggtgcagtggtgcttactgcagcctcaaactcctggctcaagccatcctctgcctcaatctcccaagtagccgggaatacaggcatgagccaccgtgcccagctaatttttaaatttttttttagtgacagggtcttgctatgtttcccatagctggtcttgaactcttggccttaacgaatcttccccctttggttggcctcctgaagtgctgggattataggcatgagcccctgagttcagcctcaaatttctcagaaaaggaaactaaggcccaagagagggaagtggtgtctgcaaatgacatatctggtgagtggagtggggggtcttaaaacagagtggatgggaggctggagggtgggaggccttactgaccttgcaggagagaaggacactctcaagtttgcctcacacttcttgtcctccccacagttcttctcaaaagggatctgaaacaccaagaagaaaggagtaacaggctcagatcaggagggacttgttcccaggcctctctgcctgccccttctcccctcttacctcccaggtttccgagtgcagggagggtctcaggatgggcggtatgtccttgccctgctgagcgaggggtagtgggcaggatggagagaggagagattaactgaggcagcagacctcatgaaggagagccggaggggcaggggcttagctcaactgggctggctgtggttggccctgcccaggagccagctgcctttccagggctgccccactctgctgcctcagcctactgccatttgtgcagtcttactctgctggcagctcttttttttttttttttttaagactgtcttactctgttgcccaggctggagtgcagtggcacaatctctgctcactgcaacctctgcctcctgggttcaagcgattcttatgcctcagcctcctgagtagctgggattacaggcatctaccaccacgcctggctaattttttaaaaatatttttagtagagatgggttttcgccatgttggcacactggtctcgaactcctggtctcaagcaatccacccccctcagccttccaaagtgctgggattacaggtgtgagccacaacacccggccggctcttttttttttttttcttctttagagacagggtttcgtgctgttgcctaggctggagggcagtggtgcaatcatagctcaatagctcactgcagcctcaaccctctggctcaagtgatcctccctgctcagcctcccaagtagctgggactacaggggcgcaccatcacaataactaattttttatgttttgtagaaagggagtcccactatgttgcccaggctggtctcaaactcctggcctcaagtgcaccatcacacccgactaatctttgtatttttagtagagatggggtttcaccatgttggccaggctggtcctgaacccctgaccttaagtgatccacccacttcagcctcccaaagtgctgggattataggagtgtgctgcccggccatgggcggctcttcttgccaaatggatttctctgataaactccccaccatccctagccatctcttcttaccgccctttggtccctcggtgtcccttcctcctcccaaagagagaaattcagggaaacattgatgggggagatgaggtcttgaacacatacctgagggtgataagaatacagcctatgtcatgaatctaacttttaccgcacttccgattagatgtataccttgtcagcattttacaagtgatgaaattctggtagttctttgtctaagaccctaccagtattgaaaatccattgactacatagcaggtgtgtacagcacacccagggggcttctcagcacagttatcatccctgagccccggttccccagcagacatcactaatcaatcccagcacttttcccccactgtgtcctaactgaagcccctgaattttgacctaggcagccattatcaaagtttgcttaagaaaatttcagaataactagaatatcctagttctagaattttgttccttgagaatagggctgggtcttagtcatttgctattaccaatgcctgacactggcattttgtaggtactcaaattgtttttcacctgaaggttctactagccctaagaggtaggtattattaccccaacatttaaaataaggaaaatgagctctcccttccttccttttctttcttctcttttccttccttctctccttctttcttttctttttttctttcttcttttccctccctccctccttgcctgcctccctccctccctcccttccttccttcctccgttgtccttccttccttccctcctttctttctctttctctttcatcctccctccttctgtccccctctagaaaagaaaaaaaaaaaagaaaatgaaaactaaaaaggtggcacagttgtcctaagaacttggagtgacagtcaagatttgaacccaaatctgtccaaatccaaagtccaggatctttccaccatgtcacactgctttcttttctggcaaatttatgtttaaaatgtctaaatcttataagaggtggaatgggagtaggcagaggggcactgagtagaggtttgaatgaaatagagggtgagtcgataattgttgaaactgggtgatgaggacctggggattcattaaactattttttttctagttttgtatgattcatattctcataataaaaagtttaaaacaggctgggtgcagtggcttacacctgtaatcccagcactttgggatgccgaggtgggtggatcacctgaggtcaggagtttgagaccagcctggccaacatggtgaaaacccatctctatcacaaatacaaaaattagccgggcatggtggtgttcacctgtaatcccagctacttggtaggatgtggtgggagaattacttgaacccaggagggcagaggctgcagtgggcccagatcataacaatgcattctagcctgggcaacacagtgagactccatctcaaaaaaaaaaaaactttaaaacaaacttcaaattcttatgtcccaatcttatactgtcttatatgaatttttttttttttttgagatggagtttcactatcattgcccaggctggaatgcaatggcacaatctcagctcactgcaacctccgcctcctgggttcaaatgattctcctgcctcagcctcctgagtagctgggattacaggcgcctgccaccacacctggctaattttttgcatttttagtagagatgggttttcaccatgttgaccaggctggtcctgaactcctgacctcaagtgatccgcccacctcagtctcccaaagtgctgggattactggcatgagccaccatgcctggccttttatgaaatatttaagagaacataacaatttgatatcaatcctttttttttttttttttttttttgagatggagtcttgctctgtcgcccaggctggagtgcaggggcgcgatctcggctcactgcaagctccgcctcccgggttcatgccattctcctgcctcagcctcccaagtagctgggactacaggcccccaccaccacgcccagctaattttttgtatttttagtagagacggggtttcaccgtgttagccaggatggtctcaatctcctcacctcgtgatccgcccaccttggcctcccaaagtgctgggattagaggcgtgagccaccgcgcccggccatattaatcccatttttatacaggattgcttataagcaactgaatctgggtatttcaacagttgttcaaactttattgttttggagacagagtctcattctgttgcccaggctggagtgcagtggcacaatcacagctcattgcaacctccacctcctgggttcaagcaatcctcctgcttcagcctcccaggtagctgggactacaggtgcgctccaccaaggctggctaattttttggtgttttttgtagagaaggggtctcgctatgttgcccaggctggtgttgaactcctaagctcaagcaatccacctacttcagcctctcaaagtgctggcatgagccaccgtgcctggcctgttttaacttttttaaaaactttttttttccatgtaccatacatgagacttaatttaaaaactttaaaaaataccctaagtttttctgggatgcatgatatgtacctggcaaataacaacataccatgatgattgaatattctgtaaaaattaaatattttaattttttttttttttttgagatggagtttcactcttgttgctcaggctggagtgcaatggcacgatctcggctcactgcaacctccatctcctgggttcaagtgattttcctgccgcagcctcccaagtagctggaattacaggcatgggccaccacgcccagctaattttgtacatttttagtagagatggggtttctccatgttggccaggctggtcttggactgccaatctcaggtgatctgcccacctcggcatcccaaagtgctgggattacaggtatgaaccaccgtgcccagccaaacattttaatatttcataattaaaaattatgaaagctgtgtagcagcattaatatataatgtatgaaaagagtagggaaaaatagtaactacattgccattgtaatcatgttaaaaatgcccataaatatattaaaaagtagaagctgctgggcacggtggctcatgcctgtaatcccagcacttttggaggccaaggtaagaggattacttgatgccaagggttttagaccagcctgggcaacacagcaagaccttgtctctacaaaaactattttttttttttttgagatggagtttcactcttgttgcccaggctggagtgcaatggcacgatcttggctcactgcaacctctgcctcctgggttcaagcaattctcctgcctcagcctcccaagtagctgggatcacaggcatgtgccaacacacgcagctaattttgtatttttagtagagatggggtttcaccatgttggccaggctggtctcgaactcctgacctcaggtgatccacccaccttggcctcccaaagtgctgagccaccgcgcttggcctacaaaaacatttttaaaaattatccagatgtggtggtgcatgcctgtagtcctagctactcgggaggctgaggtgggaggatcatttgagcccagaagttggaggctacagtgagccatgattgcatcactccactccagcctggacgatagagcaaggccctgtctctaaaaaaatttttttaataaaaaattaaaaaaattaaaaaactagaagcagccaggcacagtggtgtgcacttgtagtccctgctactcaggaagctgaggcaagagaacctcttgaggccagaagttagagtccagcctgggcaacacagtaagacccccatctctaaaaatataaaatatggccgggggcagtggctcatgcctgcaatcccagcactttgggaggccgaggtaggaggatcacctgaggtcaggagttcgagaccagcctggccaacatggtgaaaccccaactctactaaaaatataaaaattagttgggcatggtggcatgcacctgtaatcccagctactcgggaggctgaggcaggagaatcgcttgaacccgggaggcagaggctgtagtgagccgagatcatgccactgcactccagcctgggtgatagagcgagactctgtctcaaataaataaataaataaataaataaataaataaataaataaataatataaaataggccaggagcgatggctcatgcctgtaatcccagcactttgggaggccaatgcaggcagatcaccagaggtcaggagttcgagaccagcctgactaacatggtgaaaccctatctctcccaaaaatacaaaaattagctaggcatagtggcaggtgcctgtaatcccaggtactcgggagactgaggcaggagaattgcttgaacccaggaggtggaggtggccatgagccgagatcgtgctgtagtaagtgagaccgtgccactgcactacagcctgggtgacagagcgagactctgtgtcaaaaaaaaaaaaatatatatatatatatatatacacatatatatatatacacatatatatacatatatatatatacacatatatatacatatatatacacatatatatatataatttaaaaaaaacactagaagaaaatatgctaagggtgttattactaccattgcacaggagaggaagtgacagcacagagggatggaagtgacgtgtcacccactggacagtgacggagctgagcctgcccctgcaggtagctcatcccagagcattggcgctggctcccttaccgggaaatgaaatgagaagtcagtgcatgacatgctggtggtgacagctatattccttctgagttcatgtctccctcctgggaacaacccccgtcttctggtccggtggccatccagctgcagagtgtaagtgagattggcaaccaggcggcctgggcagggcggaaaaggcaagagttaaatggtgggggatcccaggccataagcctggatttggggcggcagctgccctgggagcaagaggagagctctgaccttggaactgggggatgagagacttgatctggaaacagattgtgatattaactccttctttcatcttgttactggttgaataggagcactccacttcatgcactgggatctcagctggagagaaggacatcagggtgaccatatccaccacgggccgggagctgcagggcagaaggcaaccaactctctccctccaacccaactgcacgtcccccctcagatgtggggctcccgccagcaaagccagagaactctccttccctaaagcagacctcaacatgtcactgtctcctcttaaggaaaataataatgatactttttatttatttattttgagagagggtctcaccctgttgcccaggctggagtgcagtggcatgataacagctcactacagcctcggcctcccaggctctagtaatcctcccacctcagcctcccaaggatctgggaccacaggcatgtgccaccacacctggctaactttaaataaatttttgtagagaagggaccttcctatgttgtccagggtggtcttgaactcctgagctcaagcaatcctcccggcttgggctcccaaagtgctgggattataggcatgagccaccatgcctggccaataatggtgataactaattagggctcccagttcattctagcagcctctgacccattttccatgaagaagagaaagctcttaggaagagaaatcatactgagttactttcatgcttatgtttaagccttcagtgatgcttgcatgaattttattatgcttcataataaagttgcagcttttgttgttgttagagcctcgctttgttgctcaggctggagtgcagtggtgcagtcatagctcactgcatcctcacactcctggcctccagcgatcctcttgtctcagactcctgtgtagctgggattacgggagtgagccccagtgcctggctcctatttttttttttttttttgagatcctcctcttgggctcaagcaattctcctgcctcagcctcccgagtagctgggattacaggcgcatgccaccatgcccagctaatttttgtatttttagtagagatggggtttcaacaggttggccaggctggtcttgaactcctgactaagccccccgtgcctcccattgaagatgtatacagccccctgctcctccagaggggcccccacaaccacgtccacctgacctcaaatgatccacccacctcggcctcccaaagtgctggattacaggcatgagtcattgcatccggcctatttattatttttttgtggtaggatctcactctgtagctcaggctggagtacagtggcatgatcacagctcactgcaacctcgacctcccaggctcaagtcatcctcctgccttagcctcccaagtagctgggcctacagtcatgcaccaccatacctggccaattaaaaaaaaaaaagaaaagggctgggcacggtggctcactctgtaatcctagcactttgggaggccgagacgggcggatcccttgaggtcaggagttcaaaaccagcctggccaacatggcgaaaccccgtctctactaaaaatacaaaaaaattagcagggcatggtggtgcatgcctgtgatcccagctacttgggaggctgatgcaggagaatcgcttgaacccaggaggtggaggttacagtgagccaagatcgcaccactgcactctggcctgggcaacagtgcaagactctctctcaaaagaaaaaaaaaaagtacagatggtgtcccactgtgttgcccaggctggtctcaaactcttgagctcaagtaatcttcctgccacagcctctcaaagtgctgggattacccacatgagccaccacaccctgttaatctttttttttttttgaggcggagtctcactctgtcacccaggctggagtgcaggggcgcgatctcggctcactgcaagctccgcctcctgggttcacgccattctcctgcctcagcctcccgagtagctgcgactacaggcacccgccaccacgcctggctaatttttgtatttttagtagagacagggtttcaccgtgttagccaggatggtctccatctcctgacctcgtgatccgcccgcctcggacttccgaagtgctgggattagaggtgtgagccaccgtgcccagctgccacaccctgctaatttttaattatatgttttccaatatgtaagctgtctctgggattacaggtgtgagccactgtgcctggcctggaagaccatatattaaaaaaaataaaaattaggccatgcatagtggctcctgcctgtaactccagcactctgggaggctgaggagaaagcatagtttgagaccaggagtttgagaccagctggggcaacaaagtaagtccccattgctaccaaaaaaaaaaaaaaaaattagccaggtgtggtggcgagcacctgtagtctcagctacccgagaggctgaggtgggaggatcacttaagcccagcagttcgaggctgcagtgagttatgatcatgccactgcactccagcctgagcaacaaagagagaccctgtctctaaaaaaagccaaaataaataaataaaataaaatataaacaaaacaggataagagctggggtcatcaggtgtgacctgggagacccatctcacctcagcacgatcatctggctctcagcccccacagccacatctgccaagccatccccttcaaggtccttcaccccatggatggagcgtccaaaccactgaattcctgagagcacttgggtcccttctatccgctgagagcaagaaagaaattgccactaagctgaggagaggtaggttggagggagggaaggatcgggctggggagtggggtctgggcttgggggcttagggcacctgagaatggagtgtgattggcaggcagcatacgtcacctgacttggctggggactaagccccccgtgcctcccattgaagatgtacacagccccctgctcctccagaggggcccccacagccacgtctaccagcccatcgccgttgatgtctgtcagagcagtgatggcttctccaaaccgcccgagtgggtagccggggtccccctgcagctctgagacttcttcaaaccccaactaggaagtagcaagagacaggtcacacccaagtcactcagcatgctgtcacagaacaactgagtgaagaatgctaaagaaacgtaagatggggtccctcacagaattggaatggtgctgttagactaaccagggttcaagcaccagcccagcctcttactgtcctcttactgtgaccttgtggtttcccctactgagcttggggtttccatttatatatatatacatttttttgataatttttttttgagatggagtcttgctctgtcgcacaggctggagtgcagtggtgcaatcgcagctcactacagcctcgaactcctgggctcaagcgatcctcccacctcagcctcccaagtagctgggactacaggtatgtaccaccacatctggctaactttaaaattttaatttatttatttttatttttgtagaaacagggtcttgtcatgttgcccaggctggtcttgaactcctggcttcaagcaatcatcttgcctcagcctctcaaagtgctgggattacaggcatgagccaccgcaccccagggattcccatttataaaataaagcttgtagtatctcagcaggtggtcatgaggaaagggaggtcatatctataaaaagtttggcgctgcctaccaggtgcagcggctcacgcctgtaatcccagcattttgggaggccgaggcgggtggatcacctgaggtcaggattagagaccagcctggcccacatgtcgaaacatggtctctactaagaatacaaaaattagctgggtgtggcggcaggcacctgtaatccgaacactttgggaggccgaggtgggtggatcacctgaggtcaggagttcgagaccagcctgaccaacatggtgaaaccccatctctactaaaaatacaaaaattagctgggcatggtggcacatgcctgtaatcccagctactcgggaggctgaggcaggagaatcccttgaacctgggaggtggaggttgcagtgagccgagatcgtgccactgcactctagcctgggccataagagcgagactctgtctcaaaagaaaaaagaaatattggcactggaccctgcatacagtctttccccagtgaggatttgctattgcctctctgtcgttctaaaagtttgatcgccacgtgaccagacagagaaagccttcagaataactgggagctgcgaatctctgctgctctccctcctccctctcagctccagatcctggccccacctgtcttctctggtagataaacacccggcctcctctctgctccccatagaacagtggggcaccaatcagcagcagctctgtctccccatcttggtccacgtcgacgccacacagctccccaccgaaataagagccaatctgtggggagaggcaggtgtttggggaagcgcctgtgggaacagcaggggttggcagggagatacctgtaccgtgttcatcttgtgccactccctcaaatgcaggttccaatcttggatccacccctagtctatgtgcgttaagacaaggtgggctctttgaggttcagtttcttaaactagagagggagatgacagggcttacctctgtgtgttatgagggataaatgtgatcatgtttagcacaggggctgccacatggtaagtggatgagcattcaaaggacagaagggagtgtgatgtgtgtcccgccagtccctggtctgcagatgccctcggactgggcgcacctgggtcccatggattgtctggacctggctccagtgtcctccgccctgtggctcttggaacagcagcactcggcccatgtgctggtatcgaggggctcccgaggccagcaacgaagtcttttgccgggagggcagccaggtcacggtgtaacctgaggaaagtgtgtggggcgtggagttaggaacacaggatgctggaagaacacccagcaggagaggggcaggggccccagggaattgggttagtagcagagatgcatggaaacagctgaagaccttctcctgagaaaagcatccatgtgctcccagccaaacaaatcctgccatcttggggatggcatgtcttcaactgtgggtgacatgcacacccagggaaaagcagctatgcacaacaagtggagcgtggagcctcttctgagcctcagtttacctgaggattagtaaggaagactccattctttcttcttttttagagacagagtctcgctctcttgcccaggctggaatgcaatggcgtgatctcagctcactgcaacctccgcctcccgggttcaagcaattctcctgcctcaacctcccaaatagctgggattacaggcgcccagccaccacacccagataattttttgtatttttagtagaaacagggttttgccatgttggccaggatggtctcaaactcctggcctcaggtgatccacccacctcagcctcccaaagtgctggggttacaggcataagccactgtgcccggcctcttttttcttaaataataaattaaaatgggagtccaggtgcggtggctcacgcctgtaatcccagcgctttgggaggccgaggcaggtggatcacaaggtcaggagatcgagaccatcgtggctaacacggtgaaacgccgtctctactaaaaatacaaaaaattagctggacgtggtggtaggcgcctgtagtcccagctacttgggaggctgagacaggagaatgtgaacctgggagggggagcttgaagcgagctgagatttcgctactacactccagcccgggcgacagagcgagactccgtctcaaaataaataaataaataaaataaaataaaataaaataaaataaaataaaataaaatggtatatattagtcagaagaatgcaaagttggcatggatattaaaaataaagcatgtctgggccaagtgcagtggctcacacctgtaatcctaacattttgggaagccgaggtaggaggatcacttaggccagaagtttgagaccagcctgggaaacatagtgagaccccgtctctacaaaaaattacaaaaactagccaggtgtggtgatgcacacctgtggtcccaggtactagagaggctgagaggcaaaaggattgcttgaacccaggagttcaaggctgccttgaactacgatggtgccattacactctagcctgggtgacagagtgagaccctgtctctaacaaaataaaataaagcaggaaacttgaaaaattttcatgcttaaagatatcatgttgccgggcgcggtggctcacgcctgtaatcccagcagtttgggagaccgaggcaggcggatcacgaggtcaggagatcgagaccacggtgaaaccccgtctctactaaaaatacaaaaaattagctgggcatggtggcgggcacctgtagtcccagctactcgagaggctgaggcaggagaatggcgtgaacccaggaggcggagcttgcagtgagctgagatagcgcctctgcactccagcctgggtgacagagcaagactccgtctcaaaaaaaaaaaagataccatgttggccgggagcggtggcacacgcctgtaatcccagcactctgggagcccaaggcgggtggatcacctgaggtcaggagtttgagaccagcctggtcaacatggtgaaaccccatcactactaaaaatacaaaaaattagctgggcgtggtggcaggcacctgtagtcccggctactcaggaggctgaggcaagagaatcagttgaacctgggaggtggaggttgcagtgagctaagatcgcgccacttcactccagcctgggcgacagagagactcagtctcaaaaaaaaaaaaaagaaaaaaaagatatcatgtcagtgtcaggctgtcttcatcttcaacttcctgtaatgaggttctttcctctaagataccaggacaacctctattgaatgttcgaggaaacactgcaggaaattggacccaagattgggctagagccaagagccaccagcaagcatcctctgagatgagtcactgaccccatctgatggtctctgtgcagagcagttgaaagtgagtgaagaaaacagagctgtccaaggccctacagcacatggaaggaagagtgaagagacggaaccgcttccctattgtcgtatggagtctggaagcacaagggttaagaactccaaattcttgaactccatgagacaaggtttaaatcctagtgctactgcttcctagctgtgtagtagttaagtaaattgcttcatgcctctgtgcctcagttttctcatctacaaaaagggaagaggctggacattgtggctcacggctataacctcagcactttgggaggctgaggaagggggattgctcaaagccaggaggtcaaggcagcagtgagccaagatggtgccactgcactccagcctaggtgacaaagtgagaccctatgtctaaagaaaaaaaaaaggaacagtaccaatctcatggggtgtgttttgagagttaaataagacatgtatataaaatgcttagtgctacactagtgatagctaaactgagatctgaaggataagtagcatagtagacactcaggattctgtttatttatctatccacatatatgtatatatttatgtgtgtgtatagtggggtgggtgtctaactagagattaaactttttttcttttttctttttttttgagacagagttttgctctgtcacccaggctggactgcagtggtacgatctcggctcactgcaacctgtacctccagagttcaagagattctcctacctcagcctcccgagtagctgggattacaggtgcatgccaccatgcctggctaattttttgcatttttatagagacggactttcaccatgttggccaagctggtctcgaactcctgacctcaaatgatctgccagcctcagcttcccaaagtgctgggattacagtgtgagccaccacacccagctagagattaaattttagagtcatttcttcttttttttttttcactgcaaccttaacctcccaggctcaagtgatcctcccatctcagcctcccaagtagctgggaccacaggcatgcacaaccatgcccaactaattttttttttttttttgagacaaagtctctctctgtcacccaggctggagtgcagtagtgcaatctcggctcactgtaacttccgcctcccaggttcaagtgattctcctgcctcagcctcccaagtagctgggactacaggtgcgtgtcaccaagtccagctaatttttttgtgtttttagtagagacggggtttcaccatgttggccaggctggtcttgaactcttgacctcaggtgctcttggacaattcaagaggaggaagccttaaaaaggagtggccagtcctcttactaataaggcaggttgttttaaaatgtgcctgggatttaatatataggtgtgactgatgatacagagagtcactgtcattgaaagaagtttactagccacagttccaagagggagtaggcactggatgccatgcagggccagagagggaaacactacattagtgaagaggcaggaggagccagggaagagcatggcccagagctcttcttgtggtttccacaaggaagggtggcgagctaggttggcaagttcaagcaagtttaggattgcacagtttgaataattttggctggctctgggctatagcggtggcctctggttgactgatgcctggctctgagctgatttagggcagaggaactatcggcttattgtgtaaggattagacaaaggaggtggctgaggatatgggctcggaattggctggtttgcatataaaaggccttttttttttttttttttttttagacggagtctcgctctgtcatcttggctggagtgcagtggcatgatcctcagttcactgcaacctccgcctcctgggttcaagcgattctcctgcctcagccccctgagtagctggaattaaaggcacccgccatcatgcccgactaatttttgtatttttagtagagatggggttttgccatgttggccaggctggtctcgaactcctgacctcaggtgattcacctgcctcagcctcccaaagtgctgggattacaggtgtcagccactgtgctcggccctgtttgttgagacagagtcttgctcttttgcccagactggtgcgcagcggcgtgatctccactcactgcaacctcctcctctcaggttcaaacgtttctcctgcctcagcctccagaagagctgggactacaggcatgcgccaccatgcctggctaacttttgtatttttagtagagacagggtttcaccatgttggccatgctggtcttgaactcttgacttcaggtgatccacctgcctcagcctcccaaactgctgggattacaggcatgagccaccaggaccagctacaaggcatattcacaggcaagttgtttactatctctaggaatttgcctaccctgggagaggtagtcttttcaggattagcacggccccaagatgtcaaagcatcagaaaatacagacaataaattatgaatgttatagccatatttaaactctgactttgttcatgctggttgcttaactgctttcattattgttttggaagccaggctgagtgaccatctgacctcaacaaccagaagatcccagcagaaaagagaagtactcacccaaatagcctgctctcacttctggtgtcaatggttcattcccaataaatgtgtcatcctgcaggtctgccttcaggtcaagaaagcccccagcccagtccttggctcctactgcccccacgactgcatggccctgcccagggaaggagatgagcgggtcagctacccaccgacccaccccccagagccaactgcactccctgcagcccattgctccagcccagcacgcaccctgctgaggtcagcactgatgccgctggaggacagctccatgttgaaggaagtcaggtcctgtttgcttgtgcctggggaacaaagcagagaacaggtgagacccaacagcagtaaatgcagtgaaaaaaattcatggcaggacggggaagaagtgaggtatttacttctgggtaaggtagaaggcatgcatgtgagggtcaggcagacccaggaagtggcttaatgcggagttggcttttaccctgggagtcccagatttgtttgttttttgttgttgaaacaaggtcttgctctgttgcccaggttggagtgcagtggcgcaatcacagctcactgcagcctcaaccacccaagctcaagcaaccctccgggcttagcctcctggatagtggggactataggcacacaccatcacacctggctaatttttttttttttttttttttttttgagatggagtctctctctgtcaccgaggctggagtgcggtagtgcaatctcagctcaccacagcctctgcctcctgggttcaagcgattctcctgcctcagcctcccgagtagctgggattataggtgcaccaccatgcccagctaatttttgtatttttagtagagatggggtttcaccatgttggccagcctggtctcgaactcaggtgatccacccgcctcggcctcccaatgtgttgggacaatgacaggtgtgagccactgtgcccagcctccagatttgaatatccaattactcatctccatgtgtccaagactcagctcttggtttctgctctgactcaggcttctcacttcaatgaatggcacccccactcacctaatgaaccatgctaagaaaccaaatccacctggagtcttctctatactccatctcatctccaacacatcaccaaatcatgatactcctgcctttgaaatacaccctttttcttttttttttttttgagacagggtcttgctgtgttgcccaggctggagtgcagtggtgtgatcatagctcactacagtctcaaactcctaggctgaagagatcctcctgcctcagcatcccaagtagctgggactactggtatgcaccaccgtgcctggcttatatagcttctccttaagaactcttcactggctgtgcgtggtggctcatgcctgtaatcccagcactttgggaggccaaggcaagcagattacctgaggtcaggagtttgagaccagcctgaccagcatggtgaaaccctatctctactaaaagtacaaaaattagctaggcatggtgggacatgcctgtaatcccagctacttgggaggctgaggcaggagaattgctcgaggctgggaggctcaaaaacaactggaggttgcagtgagccaagatcgcaccactgctctccagcctggctgacacagtgaaactctgtcttgaaaaaaaaaaaagccaggcacagtggctcacacctgtaatcctagcactttgggaggccaaggcgggcagattacctgaggttaggagttcaagaccagcctggccaatatggtgaaaccccgtctctactaaaaatacaaaaaatttatctgggtgtggtggcaggcgcctgtactactagctacttgggaggctgaggcaggagaatcgcttgaaccaaggaggctgaggttgcagtgagccaagatcacaccactgcgctccagcctggtgacagagcaagactgtctcaaaaaacaaaacaaaacaaaacaaaaaacctcttcatgggctgggcacagtggctcacgcctgtaatcccaacactttgtgaggctgaggcagaagacttgcttgagcccaggagttaaagatcaggctgggcaatatagtagaaactctgtctcggccgggcgtagtggctcatgcctgtaatcccagcactatgtgaggctgaagcaggaagattgcttgagcccaggagttcaagacctgcttaggcaatatagtagaaactcttttttttttttttttttttttgagacggagtctcactctgtcgcccaggctggagggcggtggcacaatcttggctcactgtgaactccacctccaggattcacgccattctcctgcctcagcctcccgagtagctgggactacaggcgcccgccaccacgcctggctaagaaactcttgtctctacaaaaaatttaaaaattagccaggtgtggtggtgtgtatctgtagtcccagctactcaggaggtcaaggtgggaggactgcttgagcccaggagtttgaggctgcagtgagccgtgatcgcactactgcactccagtctgggcaacagagtgagtccctgtctcaaaacaacaacaacaaaaaactccttcatgatttctcatcgatcttcacactgaaatccaaactctttctgagggcctggaagacccttacctccctgccaaccttctctctcccttcctcactgcgcttcggtcacactgaactttttccattttcctggcatgccgagccctttccccgcccctgggcttgcacctgtgcttctctctgccctcattccacctttctcacattgctgtttgaatctcatctttcatatctcagcttaaaagccagttgagagtgagttttttttaaaaacttttttttaaaaaatcacttttcatttttattaattatttagacatggcttcttgctatgctgcccaggctggaccattgctgctgattttttttttttttttttgagacagttttgctcttgtcacccaggctggagtacagtgtcacaatctcagctcactgcaacctctgcctcctgggttcaagcgattctcctactttagcctcccaagtagctgggtgacctcaagtgatccgcctgcctcagcctcccagagtgttgggatgacaagcgtgagccaccacgctcagcccattgcttctttaactgaaccgaacaccaaggctgtgtcctagcaaaggagactttcctgtaggaatcacatatctttcagtcaagtaagcttcctggggaaatgccctccataaccagtcctccatctggtgaccacaatataaatcttctcttattctaggccaggaaagaagacttgtgggttcttcacactggcccctgccagcctgcccttctgaagtaatgtggagccttggataagtgacagcaagacagttgagcaagaagggggaggaattacattcactctgcggggctcagatcacaccagcaagacataggtcagtcctagatcaacctgagctccaagagaagatggaatttcagaaagaaatatcagagagggccgggtgcagtggctcacgcctgtaatcctagcactttaggaggccgaggtgggcagattgcttggggccaggaattcgagaccagcccaggcaacatagcgagatccctgcctctacaaaaaatacaaaaaatacaaaaaaaaaaaaaaattagccaggtgtggtatcacacacctgtagtcccagctacgtgggaggatcacctgagcctggaaggtcaaggctgcagtgagctgtgatcatgccactgtaccccagcctgggtgacagagtgagaccctgtgaaagaaaagcaaaaaagaaaagaggctgggcgcagtggctcacgcctgtaatcccagcactttgggaggccaaggcgggcaggtcacgaggtcagatcgagatcatcctggctaacacgatgaaaccctgtctctactaaaaatacaaaaattagccaggcgtggtggctggcgcctgtagtcccagctgctcgggaggctgaggcaggagaatggcgtgagcctgggaagtggagcttgcagtgagcagagactgcgccactgcactgcagtgagcagagactgcgccactgcactccagcctgggcaacagagcaagactctgtctcaaaaaaaaaaagaaaagagagaagagaaaagaagagaagaggaggggagaggaaggggggaggagaggggaggagaggggaggggaggagagggaaagggaaggaagggaggaaggaaggaaggagagaaagaaggaagagaaagaaagatcacagaggctgctctcaaatggccctctcctaaattccttctaaaggtctgttttatttaggcaagcccttggcacaagatcagatattcagtaagtgcttattattctttgtgtttctaataggatgtcccaggggaggtttttttttgtttttttgttttgttttgttttgtttgagactgagtcttgctgtgttgcccaggctggagtgcaatggcacatctcagctcactacaacctccgcctcctgggttcaagcgattctcctgcctcagccccctgagtagctgggattacaggcatgcaccaccaagcccagctaatttttgtatttttagtagagacggggtttcgccatgttggccaggctggtctcgaactcctgacctcaggtgatctgcccacctcagcctcccaaagtgctgggattacaggtgtgagccaccgcgtccggccatttttgttttttgttttttattttttgaaatggagtcttcctctgccacccaggctggagtgcagtgtggtgcgatcttggctcactgcaacctctgcctcctgagttcaagcgattcttgcgcctcagcctcctgagtagtgggattacaggcacccaccaccacacctggctattttttgtatttttagtatagatggggttttgccatgttgcccaggctggtctcaaactcctgagctcaattgatccacctgcctcggcctcccaaagtgctgggattacaggtgtgagccaccgagcccggcctgatgtcccaggggaatttctttatgcagactcccgagccctctcccagggcctgccactcaccctcaatgacatagatcttcttctgcagctcagtgaatagatctttcagcttctcaaatgtgtccagaattttcacaaactcgctcgcgggttttgatgcaaatttgtggagggtctcctgactctccttggtctgaaaatgctttccaatctgtgagggagtggagagtgaggagctgaaatcccccaaacctcagtccagtttgctattattttcacaagagtctggccccagggagaaaggggcttggggttcagaaagaggagagggaagatatgatgcaggaagcagcaggggccctaccccgatgatgtagcggatgatgtctttggccgcatcgatgttgccactgtcagtggcctccccatccgtgatgatgataagcactttggtggcatctggccgggcccccagctcctcccggaacacctctgtcctgtgtccaggaaaggaggagatgagagactcccccaaactagggcctgaggtctctttccccacctgctcatcaagtcacctccatgctggttacgcaaaagcccttcctggatctcccaggccgggattccaagcctgcagcagtcacctctaaacctctttgctgccacccctttccttctggaccagtggtcctcacactgcatcctgggcagtccagagggtgtcccagagcccatggacaggaggaggaggttttgtgaggaatgactctgggcttcctaccctccattgcaaccacatggccaccactctttaatcagctacagatattgatccaagtgagatttcaatgtggaagagagggtcctacagctgaagaaaactggggagtcactcttccagagcaagctcttccagcacctcctctgccttcccatagtccacaggctgcctccggatctctaccatagcagtgaacctagtgaattaccgtgactcatttctctgtcaattttccccctaaaccatgagttcctcaaggaaaggaccatgttggatttgttgctgtatctctggctcccagcacaaaggaggcggttgtgcatgtgagatgaaggagggagaactagtgttacagctcttttagaatttgtctagcaggctttctgttttttgctaaaatcctccaccctcaaaaaaattaaaaaaataaaataaagaagggagaactgaacaccagatgggccaaggctaaaaatttctgccctgggagttccagaccattctgggcaacatagcgagactccaactctacaaagatgaaaacaattagccaggcatggtggtgtgtgattgtagtcccaactactcaggaggctgagacaggaggatcgcttgagcccaggagtttgaggctgcagtgagctaggatcacgtcactgcgctccagcctgggcaacagagtgagaccttgactctaaaaaaaaaagaaaaagaaaattcctgttttgcccacagccttcctctgagcaagttgggttggccatagctcttgctggaacagcagcaaggtgtgaaccgtcttacccatgaacacctgctgtcaagacctctggttctatcttggatgcaaaatgcttctccaatctccatccacacagacatgggcctattgcgggtcctgttcatggatttccaccctggtttatacaaccattgtctctcatctggatttttcagtagccttctaactggccctatcgcttccacccgcccttgccccctctacagtctaatatcaaccctgcagccagagggatcttttaaaaaacatagatcatcactcctctactcaaaacctctaatgacttctcatcttactcagaggaaagccaaagtcctcactatggcctccaagtcactaacccatccagaccctcatgatctctctgacctcatcacctactattttcccccctcacttatttctctccggccacattggtgtcctggttcttcttttttaatttatttttaatttcttagagttaagatcttgctctgttgtccaggctggagtgcaatggtgtgatcatagctcactgcagcttcaaactcctggctcataggccaggtgtggtgactcacacctgtaatcccagcactttgggagggtgaggcaggtggatcacctgaggtcaggagtttgagtccagcctggccaacatggtgaaagcctatctctactaaaaatacaaaaaaaattagccaggcgtggtggcacaggtctgtaatcccagctacttgaaaggcggaggcaggagaatggcttgaacctgggaggtggaggttgcagtgagccgagatcatgccattgcactacagcctgggcaacaagagcgaaactccatctcaaaaaacaaaaacaaaaaccaaaaaccaaacaaacaaacaaaaacttctgggctcaaaagatcctcctgcctcagcttcccaaagccctgggattacagactgtgcacctggcttagactttctcttggatttaattagtacagagtagatttctgttacgtacaaccaaaagaatctgcagtaaaattgttccacttcaattcagacaataaactgccccttgctgtacctacctactgagttcccatgccctgcagctggaagtgggtagatcacccagaacaaatcacaggacacgtgctctcctgcaaaagggaactcacgcgacataattgatggcaccaaaggtattggtcaacagcaacatgtgctttacatgcttcagcagagcatcagggtccttccatttaacataatctgagaaatcaaattctgttttgtagcttgtggaaaactgaacagcagcaaactagaaaaggaaggaagaaatgacattcagttatatatccctttccatttgtctgttccaaactctacttctttttttttttttttttttttagatggagtttcgctcttgttgcccaggctggagtgcactggcacaatcttggctcactgcaacctctgcctcccgggttccagcgattttcatgcctcagcctcccaagtagctgcgattacaggcacgtgccaccacacccgaatatttgtgtgtgtgtggtgtgtgtgtgtgtgtgtgtgtgtgtgtgtgtgtttttagtagagacggtgtttcaccatattggccaggctggtctcgaactcctcacctcaggtgatccacctgcctcagcctcccaaagtgctaggattacaggcatgagccaccgtgcccagccccaaactctacttcttctttttcaaaacagggtcttgttctgtctcccaggctggagtgcacggtcacaatcatagctcactgcagcctcagcctcccaggctcgagccatcctccctcgtcagcctccgaagtagctgggacttcaggcacgtgccaccacacttggctagtttttattttttgtagaaatggggtcttgctatgttgcctaggctggtctcgaactcctggcttcaagtgatcctcccggctaagcctcccaatgtgctgggattacaggtgtgagccactatgcctggctcaatctcttcttatgcaggacctgggcaacccaactccacatccttgcctcagataattcttttgaaaatgaggcaatatacaaataaacacagaaataaaatgaaataaaccttgctccctcatgtaacactgtgtgttgagctcctgttttctgggtccacctatgtcactgatagggatgggttccagcagccatatttctgctgagtgacgctgcttaactagatacagttggctgggccggggatcaacacctgactgaagctacgccagccagaacctcttctctgagaactggaaatttgcaaagggaggtgttggttgaggggaaggtaaaaaaccctcttggaactttaacacatgaacttaggagctttccataggtctatgtggtctaaaggcgctaagggagccagtctacggagactgagaaaagagaagaaggaagcaaagacgcaaaaagaaacagaaatgagaactagctgggcacagtggctcatgcctgtaatcccagcactttgggaggccaaggcaggaggatctcttgagagatccaggagtttgggaccagtctgggcaacacaatgataaaccatctctacagaaaatttaaaaattagccacgcacagtggtgcacatgggtagtcccagctagttgggaggatcatttgagcccaggagtttgaggctacagtgagctatgatcgtgccaccatgattccagccttggggacacagtgagaccctgtctcaaaaagaaaaaatggctgtgcacggtggctcacgcctgtaatcccagcactttgggaggccaaggtgggcagatcacaaggtcaggagttcaagaccagcctggcaacatggtgaaacaccatctctactaaaaatacaaaaatcagctgggtgtagtggcagttgcctgtaataccagctacttgggaggctgaggcaggtgacttgcttgaacctgggaggcagtgagtcgagattgtgccattgcactccagcctgggcaacaagagcaaaactccatctcaaaaaaaaaaaaaaaaaaaaggaaatgagaactagagagactcctagaagctttctactccctggttcttgtcccttccagaggcccagttatagccatgcccataggctctgaggattccacatactaacatttcctttcatggtttaagtcagttcaggtaggcatctattgcatgcaaccaagaatcctaactaacttttttacctggtacgaagtgttgctgagtttcttcatcacatccttcatgaagtccagaattttctgaaattcatctggctgcaagctcatcgaaccatcaaacagaaataccaggtctacgttgcccttgatacattctgcagaagccagacgcaagggacccagtgaagcatctctggtgtttgacctgcccatgctggttctctctagggacagccatttggaggtatttttacccaatgagtccccagttccttaccctgaaaaccagggcgcccctgcagcatgggaccctgcagattctggcggaagaggtaacacaggccactcagataggtgttctggtcacacgttcgagacagcccagggtcacaggcctaaagaaagcaaaggccaaagatttgggtctcctatttgctatgtgtcttttgggcaacatcaaccaaaactaggaacgttcagagtccttgtcctctttctcacttcctctatccaactggttaccaaggcaaggaatgtccgcctccacagtctctactgtccatccctcccatcctaccaatgctctatgccaatggatgctcaccgcctgtaggactggtggtgagtctggactccttatctgggcttacactgggcacgaccccacatttccaggtccatcttctcctagtcccaatctctttttctgtgttccagccaaatcaaattatcaagattcccagaatatacagtgcctctttctttctttctttttttttttttttttttgagatggagtctcgctctatcgcctaggctggactgcatggcatgatctcggctcactgcaagcttcgcctcccgggttcacgccattctcctgcctcagccttctgagtagctgggactacaggcacccgccactacacccggctaattttttgtatttttagcagagacggggtttcaccgtgttagccaggatggtcttgatctcccaacctcgtgatctgcctgcctcggcctcccaaagtgctgggattacaggcatgagccaccgcgcccggccatgcctctttctttctttttcccttcctctcccctcccctccgccccccactttctttctttttctttctttcttttttttttttgacggagtctcgctttgtcacccagtctggagtgcagtggtgcgatcttggctcactgcaacctctgcttcccgggttcaagtgattctcctgcctcaacctcctcagtagctgggactacaggtgcccaccaccacgcccagttaatttttgtacttttagtagagacggggtttcaccatattggccaggatggtctcaaactcctgaccttgtgtctgcccacctcggcctcccaaagtgctgggattacaggagtgagccactgcacccagccttttctttctttccttccttccttctccttccttccttcatctttctttttcttcttccttccttcctatctctctctcctcctctccccttccttccttccctccctccctccgtcctttctttctttcctttctttgctttcttgctttctttccttgctttctttcttttcaggtctcactcccatcacccaggctggagtgcagtgggacaatcatggctcactgcagcctcaacttcctgggctcaggtgattctcctacctcagcctcccaaatagctgggactacaggcacacgccaccatgcctggctattttttttttttgtagagatggcattttgccatgttgcccaggccagtcttaaactcctaggctcaagcgatccacctgtctcggcctcccaaagtcatttctttcatttatgaccctttcctgccagattgcaatttcttcaaagtctgggcttgtatcatggtcatctttttgctttgttttgtttttgttctttttagacacaggtctcactctgtctccctggctgtagtgtagtggtatgatcaagctcactgcagccttgaactcctggcctcaactgatcctcccaagtagctgggactacacgtgtgtgccaccatgcccagctaatgaaaaaaacattttttttttttttgtagggacaggattgaccaggctggtcttgaactcctggcctcaagcaatcctccagctttggcttcccaaagtgctgggattacagatgtgagccaccagcccggcctcatcaactttgtatctcactccccttcccctgtcagaacctcgcccaatgcctggctataatagtagctaaataaacaagctctacttaaatactggatgaatatttcactcagtcttctatctctcacacagaaggatgctggctgggataagttggagagagcaatgaacttgggatcaaatgagaattttattcaaatcctgactctaccactttgcaaccatgtgaccttggtcaagtctcttaaccctttggtcctgtttcctcgtgtgtgaaatgtgtacactgatccctatctcaccggagtgtcttgagggtttaaaagaaataaagtgaccaggtgtggtagctcatgcctgtaatcccagcattttgggaggccgaggcgggcagatcacctcaggtcaggagtacgagaccagcctggccaacatggcgaaaccccatctctactaaaaatacaaaaattagccaaggcatggtggcacacgcctgtaatcccagctactccggaggctgaggcaggagaatcgtttgaactcaggaggcggaggttgcagtgaactgagatcatgccactgcactccagcctgggtgacaagagtgaaactctgtctcaaaaaaaaaaaaaaaagcagtgtttcctaaactttaggcatttgtgtaatacttcacaatatctgccatatgagcatactattattttcttaatattttcctttaaatttttgtttaacttcagcctcttcctaagcaatatgatgtaagaaattataaatttgatgtgcttgtcatatatttttttctaataagccattaaatttataaccatgaaaacattaaaagtttgtataccactaaaaatcatattgcatatcaatgatcacagatatttcatatttggaagaaaagtgaggttaagttattgaaaatagctggctctgctgggtgtggtggctcacacctgtaatcccagcactttggaagctgaggcaggaagattctttttttttttttgaaacggaatttcactctgccgcccaggctggagtgcagtggcatgatctcggctcactgcaagctccgcctcccgggttcacaccattctcctgcctcagcctcctgcgtagctgggactacaggcgcccgcgaccatgcccggctgattttttgtgtttttagtagagatgggggtttcaccgtgttagccaggatggtctcgatctcctgacctcgtgatccgcctgcctcggcctcccaagtgctgggattagaggcaggaggattcttgagctcaagaccagtctgggcaacatggtgacactctctgtctacaaaaaatataaaaattagctgggcatggtagcatgcgcctatagtcccagctaattgggaggctgaggtgggaggattacttgagtgcagggaggttgaggctacaatgagctgtgatcacgccactgcactccagcctgggcaatagaataatagaatgagaccttgtctcaaaaaaaaaaaaaaaaaaaaaaaaaaggctggttcatcattggttctcaataaacactaattgactctgatgcctttgaccatctgtgggaacttttatccacattcttcttcttttcttctctcattacttgaattgagcttcacaggctctgataacaccactgcacaaaattcttaccaaaatgcttccatctgtggggtctgttgccaaggtcattcccaagtacttggaggtatagttggaacctgtaggcaccagaaggttggtctggaggagctcaggcagtctaggtgggctggggccagcctcagtttccccaagatcccattcctcccagctcaccccccagttactcacctctcagggtgactggcaggcagtgtcctgtgcccgactggcactgatagaggcttcctgtgctgttcccctcccctggagctcccacgatgaccctggtgagaaatctcacctgtgagagggagtggcccagatctgtacccatctactcctgcctgctaaggaggttcagatctcctgtctcatttctccaagcactgcagccattccccttcaagaaggtgcctctggccaggtggggtggctcatgcctgtaactttcgcatgaggccaaagtactttgggaggccgatgtcggtggatcacctgaggtcaggaacttgagaccagcctggccaatatggtgaaaccccgtctctactaaaaatacaacaattagcccagcgtggtggtgcatgcctgtaatcccatctatttgggaggctgaggcaggagaatggcttgaacctgggaggcacagattgcagagaggtgagatctaaccgttgcactacagcctgggcgacaagagcgaaaactccctctcaaaaaaaaaaaaaaagaaaaaaaaaaaaagaagatgcctccgtcctcatctcttccctacagaatcgcagagaaataattccaaatgctaaaatcctagaaaattaaggttcctttgcatttacagtctctgaggcccagagaatgatccgccagaatgtctcatgataagtacattcattcaatccttgattcaaaagccattcatggcttacctactgtgtgctgggcggtggcgtatctaagaagggttaggaagagagaacagactcctggcttccaggcgctcgcaggggagtaagggagtgtcaggaacctactgggcaatgcgaagtgttttggggctgggatccttccctgttctgcacttccatggcctccctgatcgcgtgtatcccgctttttgatccctcactcctgtctctgaggattcccaccacaggctcctccagacgggaacccctggagagctgcctcgtgccaccgactagcccaggcgagggtcggggaggcggccaccgcctcgggggctgccccagggcgggcatcaggaggaggacttgtggggcacagctcacccgtttccgacctgcaggacgcggtatccaaagtgcctcccggcgcgcggtggggagaagctccgcgcgccccgcacgtccaggttgtagctcgaggccggcgctgaggaaggcaagggtcgtcagctgcgaccgagggacccccgcccctgcacgtgcccagcaggtggccgatcccaggcccacccggatgtcgctccccaggccacccgcaccctgcgcttccgctccagggcgttgacttctgggaatatggaaggagcaactcccggcccccctagagctctgaaagctcttcccagggcctgaggatacaacttcccgtttggcctctctgcaaaaaaggaaggatgagaagttagaggctccagagagaggagcagacccaaggggccccaaggcagagggtgaccaagttctcaggcagaggccaagatggggatgcccccgagccgggtgcgcctctgccacccacttctcctgcggtcatggggcccaggcgcctcctcccacagtctcagattgtagctcccctgatccctggggggctgcctccccaccccaccgggccagtctttcggagcatctgtagatcccagctcccttccccctcagtcagcctgcccaggcgccctggcacacccagctgtcctttccgccctgctttctctccccgcatggagtttagttcagagcatcctagaatgtcatggaggctgggccttcatttgtttagatgaagggtgtggggctggaaaggggaaaggacttgcctaaaacgcgcagaggtggccccagaacccagcaccctcctcccagctctagctactcaataactatctgccttttgtttgtttgttgtttaagagacagagtcttgctctgtcacccaggctggagtgcattggcacgagcttggctcactgcaacctctgcctcatgggatgaaatgattctcatgcctcagcctcccgagtagctgggattacaggcctgtgccaccacgccaagctaattttattgtatttttagtagagacgaggttttgccatgttggccagtctgtcttaaattcctgacctcaagtaatctgcccactttagcctcctaaagtgctgggattacaggcgtgagccaccgcgcctggccctatctgtctttttaaagaacccactgccccttcttatgctcccttctctgtctttgcctccaccccttgcttatttgtttcttttatttccccactctcccctttctccttccaagatccctgggccccatatccctaaggccaatcccacttttagggggcagctccttgtttactccagctgcaccaagccctgcagtttctctggtcacagacacatgtcccttcccctgcctcctcccttgcctaccgaagaaaaagaacccagacagcagcgccatggccatcacagtgatgcaggaatccttcatccttccagcactcgagggacctgtggccccaggggcagcgtcaggaggcccgtgggatttgctggcaacctagacagggtgaaagaggaaaatgatcatgccctttggcctcttacagtggtactttctcacagaggcaacaggctggtgacactggcaggcggggagggaggtgtgcctgcaggagttgtgaaaccgcaggggttcagggaggaagtgtaagcaagttagagacatttcctgtgcctgcttgcattttcacatcatccaaaagctgacagcatgtcagggagatgacagtctccactgctgtcatggtttctcactaacatcccaactaagggctctgtaaagctcagcagaggactggtctaataaacagtggcaaaattacaatggaatgctatgcagcagtgaaaaagaatgagggaaggaaaaataaaacggggagaaagtgagagctttctctggaccttgaaagatgtacatgaactactattaaagaaaagagcagattacagaacagtgtatttaacccattttggttctaaaatgtaaaatctaaagaattggaggctgggtgcagtggctcactggctgtaattccagccctttggggcttcaggaggtggaggtaagagcatctcttgaagccaggaatcaagaccagcctgggcgacaaagtgaaactttgtctttaaaaaaaaaaaaaattggagaaaatatttgcaaatcatatctctaataagggatttgtttccagaatatattttttaaaactcttataattcaacaataaaaagacaaataaccagttttttttgttttgttttaaattttttgagacaaggtcttgctctgtcacccaagcgagagtgcactggcgcgatcacagctcaatgcaaccttgaactcccagaatcaagcgatcctcccacctctgctcctaagtagctgaaaccacaggtgcatgccaccatgcctggctaatttttcttttttgagatggtttttcactatgttgcccaggctgatcttgaactcctatgctcaagtaatcctcctgcctcggcctcccaaagtgctgggattacaggtgtgagccactgtgcccagttttttaaatttatttattttaggctagtcaagtgaagcagagggagtggagaaggaacaaagatattggtaactggttgtgctccattagttttaaacggcctggtgcggtggctcacacctctaatcctagccctgtgggaggccgaggcaggtggatcacctgaggtcaagagttcgagaccagcctggccaacatggagaaacccccgtctctaccaaaaatacaaaaattagccgggcgtggtggcgcatgcctgtaatcccagctacttgagaggctgaggcagaagaattgcttgaacccaggagatggaggttgtagtgagccaagatctcaccattgcattccagcctgggcgacagagtgagactttgtctcaaaaaaaaattagttttaaacaccactgcactcagaccaacctacctaagtttctaaatgagcaaacggtttgagtagacatttctccaatgacatataaatggccaacatgcacatgaactgatacttaacactattagtcattagagaaatgcaaatcaaaaccgcagtgagataccctttacacctactttgatggttagagtttaaagcaaaggaaataagagttagtgaagatgtgaagaaactggaagcctggtgcacattgctggcagaaatgtaaaatggcgtgactgctgtgcaaaacattttgatggttctttttttttttttttttttttttttttttttgagagagggtctcactcttgcctaggctggagtggtgtgatctcggctcactgcagcctcaacctcacgggctcgagtcattctcccacctcagcgtcctgagtagctggaactacaggtgcgggccaccacacctgactacttttttattttttgtagacatgggggtctctctaccttgcccaggctggtcttgaatttctgagctcaaattatttgcccgcctcagcctctcaaagtgctgggattgcaaacgtgagccaccgcacctagcccaacagttctttaaaacagttaaacataggccaggcatggtggctcatccctgtaatcccagcactttgggaggctgacatgagaactcctgaggtcaggagtttgagaccagcctgggcaacatggcaaaatcccgtctctactaaaagtacaaaaattatctgggtgtggtggtgcgccctgtagtcccagctactcgagaggctgaggcaggagaattgcttgaacctgggaggcagaggttgcagtaaactaagatcacaccactgtactccagcctgggcaacagagtgagactccgtctcaggaaacaaaaacaaaacgttaaacatagagttactatatgacccagaagttctcctcctaggtatatacccaaaagaattgaaatcatatgttcgtacaaaaacttatacatgtatgctcatagcagtatgaataatgactcacactagccccaaactggaaacagcctacatgtctatcagctgataaatggataaacaaaataaggtatagccatgcaatgtaatattatttgcctgtaaaaaagaatcaggctggcgattcacacctgtagtcccagcactttgggaggccaaggcaggcaaatcagctgaggtcaggagttcgagaccagcctggccgacatggtgaaaccccgtctctactaaaaatacaaaaactagccgggtatggtggcacacgcctgtaattccagctactcgggaggctgaggcaggaaaatctcttgaacccgggagacagaggttgcagtgagcgaagatcgtgccactgcactcctgcctgggtgacagagtgagactccatctcaaaaaaaaaaaaaaagtagagtactggtacatgctacaatatgagtaagccttgaaaatatgcttagtgaaagaagccagcaaaaaaaaagtcacatatagtctgactccgttaagtgaaatatccagaacgcaaatctagagagacagaaagcaagttggtgcttgctggggaaatggaggctagggagcgagtactaatgggcatagggtttcattttaggtgatgaaatgttctggaaatagactgtggtaatgattgcacaattttgtgaatctatttaaaaatcactgaattctatacttcttttttttaaatttttgagacaggatcttgttttgtcacccaggctggagtgcagtggtgcaatcatggctcactgcagcctcgacttccctgactcaagcaatcctcccacctcagcctcccaagtagctggaactacaggtgtgtgccaccatgcccagctaatttttgtattttttgtagagacagggtttcactatgctgtctaggcaggtctcaaactcctgggctcaactgatcctctctccttagcctcccaaagtgctgggattacagccctgtgcctggtgaattgtataccttagaatggtgatttatggtatgtgaattgtatctcaataaaaaataaacatgaaattatatatatgtatatatttgttaaattggaaaggatatacaaccatactttaaacagtggttagctctgtaaaatgagatttatacatttctatatggtctgcatttttttttttacaatgaggatgtataactttaccacttaaaaaaattaggcgcagtagttcacacgtataatcccagcactttgggaggccaaggtgggcagaacccctgaggtcaggagttcgagaccagcctggccaacatggtgaaactctgcctctactaaaaatacaaaaattagctgggcatggtggtgcacgcctgtaatctcagctacttgggaggctgagacagaagaatagcttgaacccaggaggcagaggttgcagtgagatgagatcgcgccattgcactccagcctaggcaacagagcaagactccatctcaaaaaataaaaaataaataaaaaataggctgggcaccacggctcatgcctgtaatcccagcactttgggaggccgtggcgggtggattacctgaggttgggagttcaagaccagcctgaccaacatggagaaaccccatctctactaaaaatacaaaattagccgggcgtggtggcgcatgcctgtaatcccagctactcgggaggctgaggcaagagaattacttgaacccaggaggtggagcttgcagggagccaagatcacgccattgcactccagtctgggcaacaggagtaagactgtctcaaaaaaaaaaaaattaaactaccattaaaaaacaaaaaatattggccgtgcatggtggcttacacctgtaatcccagccctttgggaggtcaaagtgggcggattgcttgagctcaggagtttgagaccagcctgggcaacttagcaagacccttgtgtctactaaaaataaaaataaaaaattagccaagtgtgctggtgcacgcacgtagtcctagctactcgggaaactgaggtaggaggagcacttgagtccaggaggtagaggctgcagtgagctgtgatcaggccactgtcctgcagcctgggttacagagtgataccctatccttatacacaaacaaacaaacaaacaaaccaaaacataaaaatatttaaaacacaacagagtgaaggaactatattcgtttacaagaaattgggaaggatcttcagactctccctgtgcggtgaagaaatcccgttcaacctggaaagatgtcactgccctgaggaagcctttttcagacggattatctatcatctgtactgccaggcggctggaaaaggacaagctggcttgtggtaattagaaggtattagacagtcttttgaaaattcagttaagatcagataattcaggctgatttctttgattctctgtagagcagttccaaccaaattcttttgttttgctctgaaattacaaaaagagtataagtttttagattcaaacactatggaatgtgtaaagaaggataagcattgttttttttttttttttttgagacggagtctcgctctgtcacccaggctggagtgcagtggtgtgatctcagctcactgcaagctccgcctcccgggttcacaccattctcctgcctcagcctcccgagtagctgggactacaggtgcccgccaccaagcccagctaattttttgtatttttactagagacggggtttcaccatgttagccaggatggtctcgatctcctgacctcgtgatccactcacctcggcctccccaagtgctgggattacaggcgtgagccaccgtgcccggccccaagcattgttttagtgtccaccgcccatccctaaatcccaagaggaatcattgttaacaattgaagccatatatttttcatgaataaaaaaaacttaggccaggcactgtggttcatgcctgtaatcccaacacttttggaggccgaggtgggcggctcacctgaggtcaggagttcgagaccagcctggccaacatggtgaaaccccatctctactaaaaatacaaaaattagccaggcattgtggcacgcgctaatcccagctactcaggaggctgaggcaggagaatcacatgaacctgggaggcacagattgcagtgagccaagatcaagccactgcactctagcttgaacaacagagggagattctgtctcaaaaaaaaaaaaaaaagaaagaaagaaagaaaagaaaaaaaattagttctattagttaaccatacaggtttgacctgtttggaaaaactgtaattatctcaccacagaacatctgagaattaatggctaagtcagccatctcctgtgtgaaggttttccctcaagccatcttcaaaatttagacttgaattagggtttaattttcagcaggcaagctt

SEQ ID NO: 4580 - DNA, 5775 bp, Homo Sapiens
tcctaggcggcggccgcggcggcggaggcagcagcggcggcggcagtggcggcggcgaaggtggcggcggctcggccagtactcccggcccccgccatttcggactgggagcgagcgcggcgcaggcactgaaggcggcggcggggccagaggctcagcggctcccaggtgcgggagagaggcctgctgaaaatgactgaatataaacttgtggtagttggagcttgtggcgtaggcaagagtgccttgacgatacagctaattcagaatcattttgtggacgaatatgatccaacaatagaggattcctacaggaagcaagtagtaattgatggagaaacctgtctcttggatattctcgacacagcaggtcaagaggagtacagtgcaatgagggaccagtacatgaggactggggagggctttctttgtgtatttgccataaataatactaaatcatttgaagatattcaccattatagagaacaaattaaaagagttaaggactctgaagatgtacctatggtcctagtaggaaataaatgtgatttgccttctagaacagtagacacaaaacaggctcaggacttagcaagaagttatggaattccttttattgaaacatcagcaaagacaagacagggtgttgatgatgccttctatacattagttcgagaaattcgaaaacataaagaaaagatgagcaaagatggtaaaaagaagaaaaagaagtcaaagacaaagtgtgtaattatgtaaatacaatttgtacttttttcttaaggcatactagtacaagtggtaatttttgtacattacactaaattattagcatttgttttagcattacctaatttttttcctgctccatgcagactgttagcttttaccttaaatgcttattttaaaatgacagtggaagtttttttttcctcgaagtgccagtattcccagagttttggtttttgaactagcaatgcctgtgaaaaagaaactgaatacctaagatttctgtcttggggtttttggtgcatgcagttgattacttcttatttttcttaccaagtgtgaatgttggtgtgaaacaaattaatgaagcttttgaatcatccctattctgtgttttatctagtcacataaatggattaattactaatttcagttgagaccttctaattggtttttactgaaacattgagggacacaaatttatgggcttcctgatgatgattcttctaggcatcatgtcctatagtttgtcatccctgatgaatgtaaagttacactgttcacaaaggttttgtctcctttccactgctattagtcatggtcactctccccaaaatattatattttttctataaaaagaaaaaaatggaaaaaaattacaaggcaatggaaactattataaggccatttccttttcacattagataaattactataaagactcctaatagctttttcctgttaaggcagacccagtatgaatgggattattatagcaaccattttggggctatatttacatgctactaaatttttataataattgaaaagattttaacaagtataaaaaaattctcataggaattaaatgtagtctccctgtgtcagactgctctttcatagtataactttaaatcttttcttcaacttgagtctttgaagatagttttaattctgcttgtgacattaaaagattatttgggccagttatagcttattaggtgttgaagagaccaaggttgcaagccaggccctgtgtgaaccttgagctttcatagagagtttcacagcatggactgtgtgccccacggtcatccgagtggttgtacgatgcattggttagtcaaaaatggggagggactagggcagtttggatagctcaacaagatacaatctcactctgtggtggtcctgctgacaaatcaagagcattgcttttgtttcttaagaaaacaaactcttttttaaaaattacttttaaatattaactcaaaagttgagattttggggtggtggtgtgccaagacattaattttttttttaaacaatgaagtgaaaaagttttacaatctctaggtttggctagttctcttaacactggttaaattaacattgcataaacacttttcaagtctgatccatatttaataatgctttaaaataaaaataaaaacaatccttttgataaatttaaaatgttacttattttaaaataaatgaagtgagatggcatggtgaggtgaaagtatcactggactaggttgttggtgacttaggttctagataggtgtcttttaggactctgattttgaggacatcacttactatccatttcttcatgttaaaagaagtcatctcaaactcttagttttttttttttacactatgtgatttatattccatttacataaggatacacttatttgtcaagctcagcacaatctgtaaatttttaacctatgttacaccatcttcagtgccagtcttgggcaaaattgtgcaagaggtgaagtttatatttgaatatccattctcgttttaggactcttcttccatattagtgtcatcttgcctccctaccttccacatgccccatgacttgatgcagttttaatacttgtaattcccctaaccataagatttactgctgctgtggatatctccatgaagttttcccactgagtcacatcagaaatgccctacatcttattttcctcagggctcaagagaatctgacagataccataaagggatttgacctaatcactaattttcaggtggtggctgatgctttgaacatctctttgctgcccaatccattagcgacagtaggatttttcaaccctggtatgaatagacagaaccctatccagtggaaggagaatttaataaagatagtgcagaaagaattccttaggtaatctataactaggactactcctggtaacagtaatacattccattgttttagtaaccagaaatcttcatgcaatgaaaaatactttaattcatgaagcttacttttttttttttggtgtcagagtctcgctcttgtcacccaggctggaatgcagtggcgccatctcagctcactgcaaccttccatcttcccaggttcaagcgattctcgtgcctcggcctcctgagtagctgggattacaggcgtgtgcactacactcaactaatttttgtatttttaggagagacggggtttcacctgttggccaggctggtctcgaactcctgacctcaagtgattcacccaccttggcctcataaacctgttttgcagaactcatttattcagcaaatatttattgagtgcctaccagatgccagtcaccgcacaaggcactgggtatatggtatccccaaacaagagacataatcccggtccttaggtactgctagtgtggtctgtaatatcttactaaggcctttggtatacgacccagagataacacgatgcgtattttagttttgcaaagaaggggtttggtctctgtgccagctctataattgttttgctacgattccactgaaactcttcgatcaagctactttatgtaaatcacttcattgttttaaaggaataaacttgattatattgtttttttatttggcataactgtgattcttttaggacaattactgtacacattaaggtgtatgtcagatattcatattgacccaaatgtgtaatattccagttttctctgcataagtaattaaaatatacttaaaaattaatagttttatctgggtacaaataaacagtgcctgaactagttcacagacaagggaaacttctatgtaaaaatcactatgatttctgaattgctatgtgaaactacagatctttggaacactgtttaggtagggtgttaagacttgacacagtacctcgtttctacacagagaaagaaatggccatacttcaggaactgcagtgcttatgaggggatatttaggcctcttgaatttttgatgtagatgggcatttttttaaggtagtggttaattacctttatgtgaactttgaatggtttaacaaaagatttgtttttgtagagattttaaagggggagaattctagaaataaatgttacctaattattacagccttaaagacaaaaatccttgttgaagtttttttaaaaaaagactaaattacatagacttaggcattaacatgtttgtggaagaatatagcagacgtatattgtatcatttgagtgaatgttcccaagtaggcattctaggctctatttaactgagtcacactgcataggaatttagaacctaacttttataggttatcaaaactgttgtcaccattgcacaattttgtcctaatatatacatagaaactttgtggggcatgttaagttacagtttgcacaagttcatctcatttgtattccattgatttttttttttcttctaaacattttttcttcaaaacagtatatataactttttttaggggattttttttagacagcaaaaaactatctgaagatttccatttgtcaaaaagtaatgatttcttgataattgtgtagtgaatgttttttagaacccagcagttaccttgaaagctgaatttatatttagtaacttctgtgttaatactggatagcatgaattctgcattgagaaactgaatagctgtcataaaatgctttctttcctaaagaaagatactcacatgagttcttgaagaatagtcataactagattaagatctgtgttttagtttaatagtttgaagtgcctgtttgggataatgataggtaatttagatgaatttaggggaaaaaaaagttatctgcagttatgttgagggcccatctctccccccacacccccacagagctaactgggttacagtgttttatccgaaagtttccaattccactgtcttgtgttttcatgttgaaaatacttttgcatttttcctttgagtgccaatttcttactagtactatttcttaatgtaacatgtttacctggcctgtcttttaactatttttgtatagtgtaaactgaaacatgcacattttgtacattgtgctttcttttgtgggtcatatgcagtgtgatccagttgttttccatcatttggttgcgctgacctaggaatgttggtcatatcaaacattaaaaatgaccactcttttaatgaaattaacttttaaatgtttataggagtatgtgctgtgaagtgatctaaaatttgtaatatttttgtcatgaactgtactactcctaattattgtaatgtaataaaaatagttacagtgactatgagtgtgtatttattcatgcaaatttgaactgtttgccccgaaatggatatggatactttataagccatagacactatagtataccagtgaatcttttatgcagcttgttagaagtatccttttattttctaaaaggtgctgtggatattatgtaaaggcgtgtttgcttaaacaattttccatatttagaagtagatgcaaaacaaatctgcctttatgacaaaaaaataggataacattatttatttatttccttttatcaataaggtaattgatacacaacaggtgacttggttttaggcccaaaggtagcagcagcaacattaataatggaaataattgaatagttagttatgtatgttaatgccagtcaccagcaggctatttcaaggtcagaagtaatgactccatacatattatttatttctataactacatttaaatcattaccagg

SEQ ID NO: 4581 - DNA, 598 bp, Homo Sapiens
accatggtggcgtgtgctgggcgtgccggggcgtgttgcgcctgcggctgcttctctcagcgctgatagcccgggatccacgtcccacgggccggacccgcggcgcgttcggaacttcagcctgagcctgagtaccgcgtaaggctttaatcacgggtcccgagagccctaagtcttctctttgcttgctgatctcgtaccttaatgtgcaaaagaatcacgttgggaactgaaaattcagaatcctgggcctcactcccagaggatctgatctacatgtgtggagatgcccaggaatctgctttattcgtcttttgtcctcccacctgtccccccatttcagcacctcggtaacctctgccaaagtggctgtgaatggcgttcagctgcattaccagcagactggagagggagatcacgcaagtcctgctacttcctgggatgctaggaagtggagagactgattttggacctcagctcaagaacctcaataagaagctcttcacggtggtcgcctgggatcctcgaggctatggacattccaggcccccagatcgcgatttcccagcagacttttttgaagggatgcaaaagatga

SEQ ID NO: 4582 - DNA, 2336 bp, Homo Sapiens
gaaacttaaaggtgtttaccttgtcatcagcatgtaagctaattatctcgggcaagatgtaggcttctattgtcttgttgctttagcgcttacgccccgcctctggtggctgcctaaaacctggcgccgggctaaaacaaacgcgaggcagcccccgagcctccactcaagccaattaaggaggactcggtccactccgttacgtgtacatccaacaagatcggcgttaaggtaacaccagaatatttggcaaagggagaaaaaaaaagcagcgaggcttcgccttccccctctcccttttttttcctcctcttccttcctcctccagccgccgccgaatcatgtcgatgagtccaaagcacacgactccgttctcagtgtctgacatcttgagtcccctggaggaaagctacaagaaagtgggcatggagggcggcggcctcggggctccgctggcggcgtacaggcagggccaggcggcaccgccaacagcggccatgcagcagcacgccgtggggcaccacggcgccgtcaccgccgcctaccacatgacggcggcgggggtgccccagctctcgcactccgccgtggggggctactgcaacggcaacctgggcaacatgagcgagctgccgccgtaccaggacaccatgaggaacagcgcctctggccccggatggtacggcgccaacccagacccgcgcttccccgccatctcccgcttcatgggcccggcgagcggcatgaacatgagcggcatgggcggcctgggctcgctgggggacgtgagcaagaacatggccccgctgccaagcgccccacgccggaagcgccgggtgctcttctcgcaggcgcaggtgtacgagctggagcgacgcttcaagcaacagaagtacctgtcggcgccggagcgcgagcacctggccagcatgatccacctgacgcccacgcaggtcaagatctggttccagaaccaccgctacaaaatgaagcgccaggccaaggacaaggcggcgcagcagcaactgcagcaggacagcggcggcggcgggggcggcgggggcaccgggtgcccgcagcagcaacaggctcagcagcagtcgccgcgacgcgtggcggtgccggtcctggtgaaagacggcaaaccgtgccaggcgggtgcccccgcgccgggcgccgccagcctacaaggccacgcgcagcagcaggcgcagcaccaggcgcaggccgcgcaggcggcggcagcggccatctccgtgggcagcggtggcgccggccttggcgcacacccgggccaccagccaggcagcgcaggccagtctccggacctggcgcaccacgccgccagccccgcggcgctgcagggccaggtatccagcctgtcccacctgaactcctcgggctcggactacggcaccatgtcctgctccaccttgctatacggtcggacctggtgagaggacgccgggccggccctagcccagcgctctgcctcaccgcttccctcctgcccgccacacagaccaccatccaccgctgctccacgcgcttcgacttttcttaacaacctggccgcgtttagaccaaggaacaaaaaaaccacaaaggccaaactgctggacgtctttctttttttccccccctaaaatttgtgggttttttttttaaaaaaaagaaaatgaaaaacaaccaagcgcatccaatctcaaggaatctttaagcagagaagggcataaaacagctttggggtgtctttttttggtgattcaaatgggttttccacgctagggcggggcacagattggagagggctctgtgctgacatggctctggactctaaagaccaaacttcactctggggacactctgccagcaaagaggactcgcttgtaaataccaggattttttttttttttttgaagggaggacgggagctggggagaggaaagagtcttcaacataacccacttgtcactgacacaaaggaagtgccccctccccggcaccctctggccgcctaggctcagcggcgaccgccctccgcgaaaatagtttgtttaatgtgaacttgtagctgtaaaacgctgtcaaaagttggactaaatgcctagtttttagtaatctgtacattttgttgtaaaaagaaaaaccactcccagtccccagcccttcacattttttatgggcattgacaaatctgtgtatattatttggcagtttggtatttgcggcgtcagtctttttctgttgtaacttatgtagatatttggcttaaatatagttcctaagaagcttctaataaattatacaaattaaaaagattctttttctgatta

SEQ ID NO: 4583 - DNA, 643 bp, Homo Sapiens
aagcttgcggccgcctggggaccagctccgcgcctcggcctctccgccccctccccagcctttctctcgccctcttctcccacactcccggccggcgcctcggctttgtgcgaggagatggtgtagccccctggccgccgaaggaggagccggacacttgtctcccgtctccgagctgctccccacccctggaggagagacccccccctcggctcggcgccttctgcgtctcccggctggtggggaagcctctgcgccgccggcaccatgagtgaacagagtatctgtcaggcaagagctgctgtgatggtttatgatgatgccaataagaagtgggtgccagctggtggctcaactggattcagcagagttcatatctatcaccatacaggcaacaacacattcagagtggtgggcaggaagattcaggaccatcaggtcgtgataaactgtgccattcctaaagggttgaagtacaatcaagctacacagaccttccaccagtggcgagatgctagacaggtgtatggtctcaactttggcagcaaagaagatgccaatgtctttcgcaagtgccatgatgcatgccttagaagtgttaaattcacaggaaacagggccaacattgcctagacaaaactca

SEQ ID NO: 4584 - DNA, 610 bp, Homo Sapiens
  misc_feature (370)..(370): n is a, c, g, or t
atttggccctcgaggccaagaattcggcacgaggcttttgtaatgtttgagttttgagtcttttatcaagttcttctaatgaattttaggattattttggcttatttcatcaaggaagtttggtgtaagaacttgttacctaatgagtgcccctccttgtaagttcatatttcaagttacatggttcatgccataaataaaccacacttgctttaacatcgttcagaatggtacatttaacaattggacatacagcactgtaaacaattcaaagtccattgagcttaccatgaaagaactgaaacgtatgtaggaactgtgtcctgctgcagacaagcagctgctctggctctggtgcggtgcggtgcantgaggtgaggtgggcaggtgtggaagggagaattcctgaggccagtcacaattattgaagctaaattaatttcttcctgacactttagcattaattctaagtagttctaagttcctaaaccattaactgtatagttaatttttttaaatcaaagaagaaaaaggctttccccacagatgaatgtataggaaaaaacaattaatgacaattttcaagagcctttttggttaaaaagaaaga

SEQ ID NO: 4585 - DNA, 463 bp, Homo Sapiens
gggttaaaataatcctggacaacttcctatggtgccagacccttgggcagaacttccagatgaagcagattgattctaattgctcctggataaaagaaaagagcacaggtcatcccagaaggcactgggcaacccaccccaagcctaacaatatattaagtgttgggtgtagggatggcttctcttttctctcaaacttgacagcactgttgaatcattgtcttcatttacttatgagatgattggcattgtcctttaaagcagaacaacttgagctaaagctaaaggccggtgtgcagcagccgggtgaccctttgtctctactttgccttccgtgctaagtgttgacttctgctgagtttgatttcattcatttcagctagacatgtctggtgaataaacttcttaccaatcttcccctggaatggttgagtcagctctggtgtgagttagtggccccaga

SEQ ID NO: 4586 - DNA, 439 bp, Homo Sapiens
agcggccgcggtgggcgccgcccgtctcgggccccggacccagtccgcatccgtcgtccggcccgctgctgccgccgcgcttctacccgcgctacgtgctaccgctcgccttcggcaagtacttcgcgtccgtgtcagcgcacgtcagcatctggaaggtgcccgtgtcctatgcacacaccgtcaaggccaccatgcccatctgggtggtcctcctgtcccggatcattatgaaggagaagcagagcaccaaggtatacttgtcactcatccccatcatcagcggtgtcctgctggccaccgtcaccgagttgtcttttgacatgtggggactcgtcagcgccctcgccgccacgctgtgcttctcgcttcagaacattttctccaaaaaggtcttgcgagattcacggatccaccatctccggctgctcaacatcct

SEQ ID NO: 4587 - DNA, 196 bp, Homo Sapiens
agttaccattatagccatcgagggcctgggaaaccacatcctttgcaactgtctcataaaccaagtcctgggaggcatcgtgaagaaatccatccaacttaaacgaccagtctgtctgttggttattgacaactcctctccgcatgtctttttttaagtgaatatcaatgcatcttttgtcatctccgtatctgat

SEQ ID NO: 4588 - DNA, 382 bp, Homo Sapiens
tacctctttctggccacgcccaacaaggcggggacgagtcacgctgaagttggacaacggctcgtcgattacaatcaaggctggcgagaccgtgggcaccgtaactgtgcctgcgcctaccgatgacgtgttcatcgacaagagcactcagaccgtcaagatcaccgacgcttccggcggcaacttcgaaaaactggaagtggcaggcaacggcgcaaccaccacgatcaacgacaccatcgacaaggtggatgtagttctgaccgccaccactaccgtgggtgaaggcggcaacatcgtttacaccgccagccttgtggataagaacggcgcgccggtgaccaacatcaccaacccgttgaccgtcaccctcgataacggc

SEQ ID NO: 4589 - DNA, 524 bp, Homo Sapiens
tttaatttacggtgacactatagaagagctatgacgtcgcatgcacgcgtacgtaagcttggatcctctagagcggccgcctactactactaaattcgcggccgcgtcgacagggaacacatgttgttctggtcggtcaccgccacggcgggcatgttcaggccgctcagggccttgaccagcggcttgatccgaaccaggccgtcgaccagggagtactcagtgtgcaggcgtagatgaacgaatgaagccggcatagtgatcctgtctaatctgtagaaacaacaaggcccggattgtaccgggccttggctaaaacatcagcagcgttaaagttcgccggaccgcccatgactctcataggccagccgtaccggcgcgaaggagcgtcggtgaatcggcgtcggccccagccgctgcaaggctttcaggtgcaccggtgtcggatagcccttatgcccgccgatgccataacccgggtagatcaattcgacagctgccatttcacgatcacggctgacctt

SEQ ID NO: 4590 - DNA, 349 bp, Homo Sapiens
taagcttgcggacgcccaccaccccacgccaggccttcagtcttccgaggatgaggggatctcagagctccggacagggaatcggtggtggctgggcgtggccgggcccgggccccagccgacttgagggtggaacccggcggcggaggcctctaaagcctgaccgaggcggggccgccggatcccgctgccccttgaccggaagcgggagcccagcctcggccaggaagagatgatgggcgaggggtgggcggcggccctgcagcctagcgttttggggccttggtgcgcgatggcaaccctgccacggtttcctgggagctcatatttgtgtcatggtttgccaagc

SEQ ID NO: 4591 - DNA, 2487 bp, Homo Sapiens
gggaacgtagctttttatagtttttgatccatgtcataaatttggctatgacaaaggggatattccgtctttaactctctggcaagaacattagctattttccagccctaaaaagtttggtccttagtgttctttgtaatgcaccaaagggccagatttctatcttcagaaggacaggctgtgtttgggtatatgtacatacattcacctgtatttgtgagtgtgtagtcaatgtgtgtgggttgattgtgagtagttttctttgaacttttagagaaagaaaaatattacaaatcccaagtcccagattgtagcatcattgtcagaattccaaaaattgcaaagctgaatgaatgaggaagataacagccttacaaaacacaatgacttggttactaaatgcccctttccactggatgttgttagaaaaagtatattttatcctattttgtttcgcttagcgtaattataaattttcaaattttaagggtgagaaggaatgaccaacagggaaagtaatcctctcattagctcagagcaatgaattttggctttgaaacttacattttaaaagagggttatccttgttcagaattttcatgtaaagtcctttttttgtaaaatacctacatatacgtgtgggtgtatacagcccctcccccacatacacacacacatacatatatatgtgacaagtattaacatcagtgccagacttgaacattttatccctaatgccttctctcaactctgccagtgagtgagtgtttgttttgttttttcttcaacagtattgaaaggaaaaggaattttttgaattagataactataaggaaatttactaaaggaataatgttttattgctataatggaagtacataattataaccataatgttttaagtttattcctgattttttggcattcttcgacaacaaaaacttttaaacttaaaataagctaatagatttatgtttcttcaatttaaatttcagtgtgtatccaatgttttagagcagtgattgaaaagaaagaactgtaattacaggaaaaataattcaccaccagaacaccttaatttttttttttttttttttttttgcgacagagtcttgctctgtcgccaagccagagtgcagtggtgtgatctcagttcactgcaagctccgcctcctcgtttcaagtgatcctcctgcctcagcttcctgagtaggtgggattacaagcatgcaccaccatgcccagctaatttttatatttttagtaactagtagttctttaactttcatgaacacaatcatcacttagtggtggtgagtgacttgttaaatatccaagtttcttgatgcagagactcagtaggtctggaatgcggcccaggaatgcaaatttaaaatataactttctccttttcccactgatgccattggtccttttctcaattttgagaaaacactgctttagatcttatgaaaaaatgtcttggacaaagggagttagacttattcatgccccagttcgtttccttgttagggagtatcttcacacactcatagaaaatgtgtgctcctttcaaagaccatggagccctcttcaatgcaagtattcctgtgttgacttgacaagcaactggagaaaatgttataaaaaattttaaatatcagagggatgattaaattaagttagcttcaaggtcacttccaactttgacctttattccatgaatcctgtatatgttcagtattaattctttttttttaaagtaaatatcagaaaagggaaaggggatgataaagcagtgagttgtctgttttgtgtctttgattttcttaaacaacatatggttgaggactaacattagacacctgtgtgtagtggcctctgattgcttggggttgaaataagctgtctcttcaatcattgcatgcattttttagtatataggtactctagcaaaatatgtattcttttagaatgcacacatttttagtttacatacatagcatggtattatatatcacattctgttctgtactttccattgaccattatgactttaaaatcaatttacattgcaatgcataattgaatctgcagcatctacctgctccacaatctccataaagcgcatcctttacattgtacctatttgttctccaagagatgaaggggtttccaggttccctccaattcctcaccagcaaaaaagatgctaagatgaacatcctcttacatatctcctgatggacctgcacacatcaatttccaggcatataaaaacaaactttaacaaagagaaatctattggggtttcaaattttctgtgtctcttagaaacactgaaaagtcgatttatgataaccttatggaaaatgtagcttactccttgaaataattggtattaatagaattcacccattctcccctgtagcactttctagagtcagaacctgatttaaacaaaaagaaaaaaaaaaaaaaaaaaaa

SEQ ID NO: 4592 - DNA, 213 bp, Homo Sapiens
gcggccgcctactactactatacggctgcgagaagacgacagaagggactggcctctgcccacaccttgacttcagtatttctgacctcctaaactctaataaagtcatgcttacagccaaaaaaaaaaaaaaaaaaaaaaaaaaaaaaaaaaaaaaaaaaaaaaaaaaaggaaaaaaaaaaaaaaaaaaaaaaaaaaaaaaagtcgtatcga

SEQ ID NO: 4593 - DNA, 379 bp, Homo Sapiens; identical to SEQ ID NO: 2635
  misc_feature (297)..(297): n is a, c, g, or t
  misc_feature (305)..(305): n is a, c, g, or t

SEQ ID NO: 4594 - DNA, 414 bp, Homo Sapiens
gaatccaatctgtgcggggtagggtggattgctgcagagaagtcggcacgtgttaaagctaaaattttcctttgttgcagttttattaaccatagcctatgccatagtgccacctgttgagtgctaccgatgggcattctggctggaagaaccacttgtccatagtgttaatagtgctctctattaatggtgttagattttaaaggtctcacaatgattgaagctcttcagagggtgagtgctccttatctgacatgcttgggaccagaagtgttttggatttgtgagtttttttgaattttcaaatatctgcacgtacttactggttgagcagccctaaactgaaaaatctgaaatccaaaatgctccaacgagatgacctttgagtgccaggtcggtgctcaaaagggttct

SEQ ID NO: 4595 - DNA, 867 bp, Homo Sapiens
cgtttcagcgtggcggcgctggtgctggcgttggccctggaggacggccccgagtgatggctggcgcctgcctcccgggtgtctcccgggtacagatggagtcgtcccgcggccgccggcggcaaggtcggcagctgcgaggccaagagagaccccaggacacacacagctgcctcccggtgcgagaagaagaccccggcttgagagtgagatggcgtttaatgattgcttcagtttgaactaccctggcaacccctgcccaggggacttgatcgaagtgttccgtcctggctatcagcactgggccctgtacttgggtgatggttacgttatcaacatagcacctgtagatggcattcctgcgtcctttacaagcgccaagtctgtattcagcagtaaggccctggtgaaaatgcagctcttgaaggatgttgtgggaaatgacacatacagaataaacaataaatacgatgaaacgtacccccctctccctgtggaagaaatcataaagcggtcagagtttgtaattggacaggaggtggcctataacttacttgtcaacaactgtgaacattttgtgacattgcttcgctatggagaaggagtttcagagcaggccaaccgagcgataagtaccgttgagtttgtgacagctgctgttggtgtcttctcattcctgggcttgtttccaaaaggacaaagagcaaaatactattaacaatttaccaaagagatattgatattgaaggaatttgggaggaggaaaagaaacctggggtgaatacttattttcagtgcatcattactgttccagattcctatgatggatggcagactctttaataaattgcttactgatattatctt

SEQ ID NO: 4596 - DNA, 410 bp, Homo Sapiens
tactcaaccaaaacctatttggcatcctttgcactgaaatttacagtattctgtgagatgtcgcatattttgaagaaaccgtggaagatactggtttatttcaaatgagcagagtatgttgtattaaaatcttatctaatcttgattaaaatttggcaaactcttttctttgctacatcttagtgacaataaatgccaaataggttttggttgagtatagttttgaaaacaaatttgggtggataaagcagggcaaaaaaatttaagtataactcaagtagtggctttggttccactgtttataaataaaaagtagataacaatgaataatgtgacattttctggacaactgtcttgacttctgattaagatattttaagagatgtgaatttgttattttgtatgtttta

SEQ ID NO: 4597 - DNA, 487 bp, Homo Sapiens
cccaatcatatcctttgaaagcatgatctatcctgattccaacaacacgtataattgtggaaaccatacaacttatttatgtttctttaaaagcatttacctcttctctctctagccatccgtccaccaccaccaaagaacatgtcaaagatgtccatgggtgaagagaagctggggctgcctgagcctccttctttaattgcctgctctccgccttggtcataaacatcccttttctttggatctgaaagcacttcatatgcctgggatatgagtttaaactttaaaagagagagagagagagatttttagagaagtttcagttgttttgttaagcaaacctgccatataaacatacaaagtaatagaggtattctgcccccaaacccttgaactagccagtctatacatcctctacctggaatctgacttgcctgtctacctactcctttggtaaagtgggaaacacagggcaaacatattaagg

SEQ ID NO: 4598 - DNA, 219 bp, Homo Sapiens
ttttatatttatttttgatttgggtatttcttgcaatttatttccacttctggaggaagaaaatatgtttagagtattttaactgctgtacagacactgccaagtcaagtccacgaagcttcagtaccaagggtggccctgcctggccaccatctgcagggaggccaggtgctgccccagcacctcagctgtcatcactctttttcccacaggctgggg

SEQ ID NO: 4599 - DNA, 2527 bp, Homo Sapiens
  misc_feature (2508)..(2508): n is a, c, g, or t
ctcctctgctcctcgaagaaggccagggcggggctgccgcaagttttgacattttcgcagcggagacgcgcgcgggcactctcgggccgacggctgcggcggcggccgaccctccagagccccttagtcgcgccccggccctcccgctgcccggagtccggcggccacgaggcccagccgcgtcctcccgcgcttgctcgcccggcggccgcagccatgtcccgggggcccgaggaggtgaaccggctcacggagagcacctaccggaatgttatggaacagttcaatcctgggctgcgaaatttaataaacctggggaaaaattatgagaaagctgtaaacgctatgatcctggcaggaaaagcctactacgatggagtggccaagatcggtgagattgccactgggtcccccgtgtcaactgaactgggacatgtcctcatagagatttcaagtacccacaagaaactcaacgagagtcttgatgaaaattttaaaaaattccacaaagagattatccatgagctggagaagaagatagaacttgacgtgaaatatatgaacgcaactctaaaaagataccaaacagaacacaagaataaattagagtctttggagaaatcccaagctgagttgaagaagatcagaaggaaaagccaaggaagccgaaacgcactcaaatatgaacacaaagaaattgagtatgtggagaccgttacttctcgtcagagtgaaatccagaaattcattgcagatggttgcaaagaggctctgcttgaagagaagaggcgcttctgctttctggttgataagcactgtggctttgcaaaccacatacattattatcacttacagtctgcagaactactgaattccaagctgcctcggtggcaggagacctgtgttgatgccatcaaagtgccagagaaaatcatgaatatgatcgaagaaataaagaccccagcctctacccccgtgtctggaactcctcaggcttcacccatgatcgagagaagcaatgtggttaggaaagattacgacaccctttctaaatgctcaccaaagatgccccccgctccttcaggcagagcatataccagtcccttgatcgatatgtttaataacccagccacggctgccccgaattcacaaagggtaaataattcaacaggtacttccgaagatcccagtttacagcgatcagtttcggttgcaacgggactgaacatgatgaagaagcagaaagtgaagaccatcttcccgcacactgcgggctccaacaagaccttactcagctttgcacagggagatgtcatcacgctgctcatccccgaggagaaggatggctggctctatggagaacacgacgtgtccaaggcgaggggttggttcccgtcgtcgtacacgaagttgctggaagaaaatgagacagaagcagtgaccgtgcccacgccaagccccacaccagtgagaagcatcagcaccgtgaacttgtctgagaatagcagtgttgtcatccccccacccgactacttggaatgcctatccatgggggcagctgccgacaggagagcagattcggccaggacgacatccacctttaaggccccagcgtccaagcccgagaccgcggctcctaacgatgccaacgggactgcaaagccgccttttctcagcggagaaaacccctttgccactgtgaaactccgcccgactgtgacgaatgatcgctcagcacccatcattcgatgagaggacagccaaggactctcccgggcctctccggttctcccttgcggaatgatgggcgcatcctgtctgccacgtgctgacggtcgggaagcttcagtggagaggcctaactctaatgtcgcctgcttaagcaaatcatgcttctctgtttcacgtagttgggttgacaagtttctgcctttaagataaatgagtaatagtctaatgaccagctcagccatttaaaatattttcttcctattctgttcaagaaacagtaaacttggtttcaatctttactgtattttttaaatgaattttttccttaataacagccagaataagggatagtctatgctttcaggactggctttctgcacctgatatgaatgagaccagttttattttataaagcatgtgctcttaatagcattatgtctaaagaagatatcacgtaagtttgcatcttagcatgcaaatcataattttaagcaatataaattatgaaaatactatataaatgtaatttaacttaaaatgtttaagtgtagagcttccagagatggagaaacccccaccctccctccaaccacgccagagctgtagagtgctaagacgctttgcctgcccttatcacagccacacgtagcactcgacgaaatctcctccgagagctccttttcttggtagttaggagtcgccaacggattcgctgcacacggcccatccaggacacaggctggggcgttcggagtcacggctccttgtgttcttcantcagctagttgggccaaag

SEQ ID NO: 4600 - DNA, 1466 bp, Homo Sapiens
gggacatgtggaactccactccaaaagcggcggcttgcggcggactctctctagtcaggcggccagctggcgttcgtggcacacttgctgtcggctccgctcatctgttgggaatgcgtcctgtgggcctagtcctccgctggaagaaacgcgctgttctccccaaccaccgtttatcattcttattcaccgtctccggaatgtccgttcagtttccgctcctgagagacttagtgactgaggccaggcaaagatttcaccttggggagggggaacgttaaacctttcctccagcagctttcgtgttttaaattgtattcatccgccatggaaagacatcagaagcccaggatctaagagacagactgaaatgaagaaagtagataatattgtgagaataatgaacaagctggtcactgaacagcagaaccgtaatggagtcccagttaaagggttttaactttatttcgtcactttttgcaagcatgatacaaagaaaacaaacacctaactacgctacggtttatagttaaaaggaaggtggaagatcctgagtcattacagcaatcacaaaacatgatggatttcttcatttaaaaacacaaaagaggtcttggcatagttttcaagggcaaagcatgacaagactctccagtgctttctttcatccccctctgtgtgcctttttcagcctgactcacagcctggctcaatcctaatctttctacatgcaaagatgcagcatttaaagcaatttttcctgtgcagtatttgtagaatgacagatcctgccagaagctcttggaaacattttggaactatcttgctttcctgtatgttatgatccatctagcaccgttttcctcctgtggtagccaatgacacttttttcaagcatcagctgcagaaatgagtctaccagatggaataagatactggtaaagggaaagatttgtttctaagactgcatcaaatgaatgcacccaaatctgtgagttgattaatctgtgaagaagtacaaccggcagtatttacatatctcaatgagtctcaaagtgtggtcgaggaagcctgggggcccttgggaccctttcagaggttccacgagctcaaatctattttcataacctgctaagtctttatttccttttccactccagaggctatataatgtctgatgacatcatcgctttataggatgagagaatacgtgcttgtatattcttgtgtttgtaggactttccaggtttatttattaccatatggcaattttcaataagtataacccacaaaacccaacagatttttggggcacctctaacaagggtcctaagaccaaaatgtttgaggactgctaatcgatattattcaattgtctagtcccctaaactccaacccttcttatcaggactacagagagaaaacaggtggtcttcttgacaatcgctttgtatttacattcagtg

SEQ ID NO: 4601 - DNA, 561 bp, Homo Sapiens
  misc_feature (555)..(555): n is a, c, g, or t
cgcacccagcactcggtcccagccgataaatctggggcagcgcgcggtaggagctgcgggcggccaggccccttcctgcgtccgcacctggccccgcgcgcccctctcgggcgtccggcttccggcgtcctggcggctcgggtggcggcggttcgggcggccgctggctgctcctcggggcggcgaccgggctcacgcgcgggcccgccgcgccttcaccgccgcgcgctctgacgccggcataagggccatgtgttctgaaattattttgaggcaagaagttttgaaagatggtttccacagagaccttttaatcaaagtgaagtttggggaaagcattgaggacttgcacacctgccgtctcttaattaaacaggacattcctgcaggactttatgtggatccgtatgagttggcttcattacgagagagaaacataacagaggcagtgatggtttcagaaaaattttgatatagaggccctactattgtccaaggagtctgaagttctcattaatgccagacgagattcacagtgcattgatgtttaagccnttttgc

SEQ ID NO: 4602 - DNA, 1187 bp, Homo Sapiens
tagggggcgccgcgttggaacgcccgaagaggtgctgctggggtggttggaagccggtggggggcgggtgtatggcggctaggcctggaagaccacgaggaccgctagcgccgtggggtcactcttcctcatgccacaggttgccgagcctcgggggagaggtggggtcccaggggccaacccttgggtgtgttgatggcggcaggctaacccagccaacggggtgccactgccgggcaaggtgaggagcaagaagatttccagggctgggaggtagagggccaggatcccaaggagagggcttactgcgaggagcagcccaggatggataaggagttgaggccccagggatgctgagcctgcacaagtggaagtgactggctaccagactctgaaaaacctaagtcctttagggaagaccacaaaagcatccaaccacagtctgcgctgcagcccggcagaactaagtcttgggcgccgcgacgcctttcctacggaataggtcctggaaggaagaccatttaagtctttccccccaggactggcgaggagagcacgccttcccttccgaaggtgcgttaccagattgctgccgtttttgtgctgggtcatcagagcagattcccctccaggttacagattaaacttaactctacccgtgctgaaaatggccggagcacgccgcctcgcctcccctccccaaggctgccggagccgccggcccctgcctccttttcgacgactgatcgtccaaggactggcgccggatccaacacctttccccagctctgcgcgtaccgcgctctttgggaacgaattggtccctgtctgcttccaagggtccctggaaccttctgcagctgtgcctctccagagctccgcctcattagtgccacgttcctggtttgaaaaccatagtacttcaacctcttctagatgggagttaacctttgccctctgaaagaaaggtttgataagcaaagagagtttggtgagcaagatccttgaggtaagagctgatctctgacgtccgctgggaactggccgctctgcaggtttctgtatcacattttctgcacatgtccattagaattggagatggggcgtatctagtgttgaataaaggcccggcagcctcccagatgcaccctgtctaaaaaaaaaaaaaaaaaaaaaaaaaaaaaaaa

SEQ ID NO: 4603 - DNA, 410 bp, Homo Sapiens
ttttttttttacttttttcattgcattgggtatcataagtacttagccacatttccattgggtttcttgtcattgttttttatttttcctgttgttgatttgcagttccttgaaaatttcttcagtattttgtatctaccttaattacaccattgatcacactgtcctcaaattgatgtttcccccagtactctatatgtttcctgaggaaagaaatacagtctgattcaattctatatcccttgagactggcttgaagtaggacagcaatgaatatttactgtatgggcaaagggctaaactgctaactgaagcccagggtacaagggatgacctccttcagcaaagactgtgttgtgttcatctgtcttacctccatctcccttgtcccccttccaatacctagcaca

SEQ ID NO: 4604 - DNA, 257 bp, Homo Sapiens
gcggccgccaacagggtgtcggtgtcgcagcggcggaacaccaccacgggtgcttcggccgcttccgccgcctcggccatggcctccctcacggcctcgcgggcccacagcctcggaggcctggacccggccttcaccagcacagaggacctaaactgcaaggagaacttggagcaggacctcggcgatgacaacagcaacgacctgctgctcagctgcccgcacttccgcaatgagatcgggggcgaagtgtgagc

SEQ ID NO: 4605 - DNA, 366 bp, Homo Sapiens
cggccgcgctggccgagggccggggtcgcgtggcccacgcgcacgcctgcgtggacgagctgctggagctggtggtgcaggccgtgccgctgccctggctggtgggacccttcgcgcccatccttgtggagcgacccgagcccctgcccgacctggcggacctggtggacgaggtcatcgggggccctgacccccgctgggcgcacctggactggccggcccagcagagagcctgggaggcagagcacagggacgggagtgggaatggggatggggacaggatgggtgttgccggggacatctgccagcaggaacccgagacccccagctgcccggtcaagcacaccctgatgcccgagctggact

SEQ ID NO: 4606 - DNA, 495 bp, Homo Sapiens
ttttataaactaggatattatatttttattagtagtaacaattattaagattgagagtcttaagaaaggctattggaaataataggtaaaaatgtagaactcagaatatgagaaatagaatgtaaatgatataattgtgtaaaaaatgcctagtttagaatactgaagtttgttttgtttcattttatttaacttttaaaacttacatcttttgtttaatttttatttttttggatggttaagtacatgaaagaagaaaaacttggttaattttgcctgattattttaaacattggaagcaaaatacaagatttgtatttcatactacaggaccgcttccatcatccatctggagagacagagagagagagggagagagagagagaagcgcggcggtgataagtctcccagtgtgagagaaatcggggaggggcgaagaagggtaggcctcttctgttccattgataccacgttcattcacagggagccggctaa

SEQ ID NO: 4607 - DNA, 419 bp, Homo Sapiens
tttttttttttttttttcaataaaagtttagaaagaaaaaagtgatgcctgatctttcaacagacaggtggggctctgtagctgccactaccacagatgcacacaaaaacagcaccctcatttccagggggagcctcaggccccgagataaatgtgctccatggacctggaagcgggtagttccaggtccaaaaagttcctcctgaggctgctcacaaaacagctgactatagctatagctatggctcttggggtttcagtctcacactgagcatctgactctggctcccaaggggtcaaagaacaagccctgggactggcatacacagggcatcctgctagcccatagcttggccatataggaccaggtcaacacacatatatattccctaacttgaatctctctcggcctcgtgccg

SEQ ID NO: 4608 - DNA, 255 bp, Homo Sapiens
tacatctgggttaatcaattttttttttttttttttttttagcattccattagatattcctctccgggcattaaggtctcatctttaaattggagatttctcactagggatcacaacggtaactttaacttaaaacaatctttccagagttaatgttctacctactaaatgtcaagaacccaactggtgtgccacacatacttgtactacacatgccaccactgcatgcatagtatttaaaaacggccaaaaatg

SEQ ID NO: 4609 - DNA, 393 bp, Homo Sapiens
tttttttttttttttttcattaacaactttcttttattaaaaatgtacataagtaaaaggaacatggtttaattgtgcaaagagtaagaaatacagatgagcaaataacacgtattaaagccacctacgatataccacccagaagtaaccaggctgttgaatttttagagactggggtgcaaacacattttttcactcccttgtgcatatatctgggagctctgccatatacagacacagacgcggtgtccacaggcgatgcctctgctgggaatgctgcaagcaggagtctatcctttcctggtactggctcgggggccctcctcagcgcccaggtcactctagcatccaggagtccaaaggcccggctgtgcaggctgcagaggtgatcta

SEQ ID NO: 4610 - DNA, 468 bp, Homo Sapiens
gcggccgccgccgcctcagtcatggctcctcgttgttgccgatgtttttgtacctccatctgcggaggccgcggcgcccggccccagctgccccggacgtgcggcgacggcacgcagcactgcggcagggggaagccagccctcgctgcggccgaggaatggccatgagatgtgagtagaagccccctggacagcctccaaaagagaactgtgagaaaaggttcttcaatcctaaaaatgatggaggaaaaaacagtccctcttcctcagacagtgacacctcaaactgctacagtcacctttgcagcaagtctgaagatgccaccaacatcaaagggaatggagagttggtccttggtgatagcattaagccactgtatcaaccaatcctgacaatttgtatgacttctggatttccagccacattacaacaatgtaacaataaacatttattaattgcttaagcca

SEQ ID NO: 4611 - DNA, 335 bp, Homo Sapiens
ttttttttttctcagttcagaggcttttaaaaaaatattctagacctagtaaagtgcctccattcataaaatgaaacatccaagattgagacaatttcatactgatgcgcatctaaaataggtcgacgtatacagtaaataaacagcgcctctaagttgccatatttcagttagtggaatacacacccagccttcgccgttctggatgtgcaaactagaaactgaagacaaatggggatttcagcgtctagtcccaatcgttcagcacggaagtactccacacggtcggctgcttttcaaaaaccaccaggacgacgtcccatgtcgagccgacc

SEQ ID NO: 4612 - DNA, 621 bp, Homo Sapiens
ggcacgagggtgagcccgccgccgtggagtgtagcggaaagggctcgccgtcctcctccgtttctcgctgcttcgggacgcgctctctgcggctctgtgagcgcccctgagcgccggcagcggccgcggtgggttcttcaggttatcttatgatgaggcttttgctatggctaatgatcccttggaaggcttccatgaagtaaaccttgcttcacctacttctccggaccttcttggtgtgtatgaatcaggaactcaagagcagactacctcaccaagtgtcatctaccggccacacccttcagctttatcctctgtacctatccaggcaaatgcattagatgtttctgaacttcctacacaacccgtgtattcatcccccagacgtttaaattgtgcggaaatatctagtatcagctttcatgttacagacccagccccttgctctacctctggagtcacagctggattaactaaattaactacaagaaaggacaactataatgcagagagagagtttttacagggtgctactataacagaggcttgcgatggcagtgatgatatttttgggttgagtactgatagtctgtctcgtttacgaagcccatctgttttgga

SEQ ID NO: 4613 - DNA, 472 bp, Homo Sapiens
  misc_feature (458)..(458): n is a, c, g, or t
agcggccgcgtgcaggggctgctggaggaggaggcggcggctcgaggccgtctggagcgcacccgtctcggagcgcttgcgctgccccgcggggacaggcccggacgggcgccgccggccgccagcgcccgcccgtctcgcagcaagagaggtggagaagagcgagtacttgagaaagaagaggaagaagatgatgatgaagatgaagatgaagaagatgatgtgtcagagggctctgaagtgcccgagagtgaccgtcctgcaggtgcccagcaccaccagcttaacggcgagcggggacctcagagtgccaaggagagggtcaaggagtggaccccctgcggaccgcaccagggccaggatgaagggcgggggccagccccgggcagcggcacccgccaggtgttctccatggcagccatgaacaaggaagggggaacagcttctgttgccaccgngccagactccccgt

SEQ ID NO: 4614 - DNA, 391 bp, Homo Sapiens
  misc_feature (384)..(384): n is a, c, g, or t
attttttccccttagtctccttgttcatgttgctcacaacaagaaatgggctaatgctatgaataataataacaaacactgccttctgtcaggccctgtgctgaataccgtctgcatatgtataggaaagggttaactcagcaggtcttgtttgcccagactctgtacatttccaagaaaggtctgcctttaggactggtcttggccagctcctggagaatgagctctcagcttttagaaaattctatctgctaagaatagttttgcatgtctcaggtcttgggcacaaaatatcagtttaatcagatggtttatgttaacaagtatgatttatggcaaacatagatctctaatctccatttctctctcatatatctatattyntctatcc

SEQ ID NO: 4615 - DNA, 211 bp, Homo Sapiens
  misc_feature (45)..(45): n is a, c, g, or t
  misc_feature (57)..(57): n is a, c, g, or t
  misc_feature (104)..(104): n is a, c, g, or t
  misc_feature (157)..(157): n is a, c, g, or t
  misc_feature (168)..(168): n is a, c, g, or t
  misc_feature (170)..(170): n is a, c, g, or t
aagtagccgaagcggctggagcgggcggcaaggcgaggcgaaagntgcacagggccntacgcggccgcctcagcatgtcggacttcgacgagttcgagcggcantcatacgagaataaacaagagcgggacaaggagaaccggcatcggaagcgcancacagccgctntnggagccgggaccgcaaacgccggagccggagccgcgaccgg

SEQ ID NO: 4616 - DNA, 330 bp, Homo Sapiens
tttgaattatgtgtattttcatttgttttttcttttgtctcctgtaggccctcctgtcggtccttcgagaaagccatcgttcaagaacagtttttaggaaagttggaggatttgtgtacattacatccttgctcgttgctatggaaagatctttgagctgtccacccaagaatggctgggagaaagtgaaccagaatcaagtgtttgaacttcttcacactgtgttctgcacgttgactgcagcaatgcgctatgagccagccaactctcatttcttcaaaacagagattcagtatgagaagttggcagatgctgttcgatttcttggct

SEQ ID NO: 4617 - DNA, 451 bp, Homo Sapiens
  misc_feature (29)..(29): n is a, c, g, or t
  misc_feature (270)..(270): n is a, c, g, or t
  misc_feature (305)..(305): n is a, c, g, or t
  misc_feature (405)..(405): n is a, c, g, or t
ttttaatttttaaatgcaatatttaatcnctgtcagattacttgaagacaaagttttacagaaatttttaaatttcaaaaaaaaaactgcaatgtaccaataaacacctagaaaataatataattaaaaaatttaaagcatcaaacaacctcaagatctcgtcaggaataatgaacaaggcattttgcgttcacatcggttagcaacttgcatcccagttcacgcgggggagggtgatggtcgatatttctgtgtgtgtgagaatccagncacaattattttgcccgttttcccaagagaaagangccagggggaggggcagaggatggacggagggggctcggctgcagtacgtttttggttcagcgattgtgtttccttgaaacacatttaggtaaattcttncttcgaattcttaattgctggggattggggaaaccctgacctgccc

SEQ ID NO: 4618 - DNA, 519 bp, Homo Sapiens
  misc_feature (121)..(121): n is a, c, g, or t
  misc_feature (126)..(126): n is a, c, g, or t
  misc_feature (133)..(133): n is a, c, g, or t
gcggccgcagacgcccggccacgtcggctgcagcccggctcccggcccacggcggcgggaggagcgggaggaggaggaagaggaggaggaagggagcgggaggaggagtgaagtggtatanctcantcccggnatccggctcagcgccaggcagggctaagggccacccgagcggattcggccccgcggtcagggccaagctgggctccggcgctgctgctcccgcggcgccgactggagctccagagcccctcccgtctctacctgctcgagctcccgaagtcgccgcgccttaacccgccgtgtcggggcccgaagcgccactagggaagcccagctccccgctggaaggacgctccggacactgcgaatgaatgacgacaacgcggctcacttggagcgggtccgggtttgtgcggactcggtaccaccgcgggctccgcgcgccgagctgagcagctgtggctggcttcgggggaaccttcgggggaagctcctggggaccgtgtgccaagcact

SEQ ID NO: 4619 - DNA, 485 bp, Homo Sapiens
ttttcagttcttcctaagtttaatcttttccatgtggtttcattcatttatgaaaaatatgaccacgcataccgatattcgcccgtagggctcacatgtattgcgagagtcagagagaaattttggggcacttctcaccattgctctttttcaggctagaggacaactgatcacacatactgtgtgcccctgcatatgcagctctgagaatacaaagtgagtagtaggaggttaggatgtgtgagctagggagtatgtcatcctctgccggttctgcctgtttacccacagtgagatgggtgggtggtgggcgttccccaccttgtactcctgtgtagcatcgtccagtggcacaacggtgtgggcccggtgggtgtgggaaattgcacatatcaagcatacagcctcctggtcctcataacagaaaaggctgagggctcatggtgttggggggcagaggctctcatcccggatcttccgcttga

SEQ ID NO: 4620 - DNA, 528 bp, Homo Sapiens
ttcttcaatctttaaaaagtaagctaaagtccttgtggtaggcagcctctaacaaatagaatatagcagaaataatgagataccacttccaagattaggttataaaaattcttaggtgtcaccttctctcactcatttgctcagagggaggcagatgccaaactgtggtgccctttggagaggcccatatggcaaagaactgagaaaagcctctggccaacagccagcaacaattgatttcttcagtccaagagccccaggaaactgaaccctgcaagagccacatgaatgagttcagaaacagatcttccaccagtagagcttccagatgtgactgcaaccccaactgacagcttgactaccacctcttttatgagccacaggcacccagctaagctgcacccagatttctaacccacagaaactgtaagataatgtttgttgtcttaagtccttaaattctggtgcaatgtgctatgcaacaataaataagactatcctgtccaacacctcgtgccgaattcttgg

SEQ ID NO: 4621 - DNA, 568 bp, Homo Sapiens
gcggccgcgggcccggcagaaggccgagtaggagggaccacgcgccgggggccgcgatctctggcagggggcggtgtgccagcggagcaccatgcacataggcgcccagcgccccgactacccctcccgaggaaaagaggccggggccgcgctggggcggcggagagcatgagggaggccggggggcggctcggcttggagcgctgctagggagcggtgcgcgccgcacacccgcctgggcgcggcggagggcggggagccgggcaggtcgcgcctgcgggcggcagccgaccgccgggagctgttctgatttccgacgcgcacgctaggggcccggagcagcccccggccccggcgcgccgccgacatgggcaacgcagggagcatggattcgcagcagaccgatttcagggcgcacaacgtgcctttgaagctgccgatgccagagccaggtgaactggaggagcgatttgccatcgtgctgaacgctatgaacctacctcctgacaaagccaggttactggcgcagtatgataatgagaaaaaatgggaactgatttgtgatcag

SEQ ID NO: 4622 - DNA, 6035 bp, Homo Sapiens
ctccccaggcccaggcgagcgctggtgtggacgggaagctcccggcccggcgaactaactggagcacggagctgcagccggttgggccggtgtactttcccgctctggaaaggaagagaaatggaagtgagaaagttgagcatttcctggcagttcttgatagttctggttctgatcctgcaaattctgtctgcgttggattttgacccatacagagtcctaggggtcagccgaacagccagtcaggctgatattaaaaaggcttataagaagctcgcccgggaatggcatcctgacaaaaacaaagatcctggagcagaagacaagttcattcaaatcagtaaggcttacgagattctttcaaatgaagaaaagagatcaaattatgatcaatatggagacgctggagagaaccagggctaccagaagcagcaacagcagcgagagtatcgcttccgccatttccatgaaaatttttattttgatgaatccttttttcacttcccttttaattctgaacggcgggactcaattgacgaaaagtatttattgcacttttcacattatgtgaatgaagtggttccagatagcttcaagaaaccctacctcatcaagatcacctccgattggtgctttagctgcattcatatcgagcctgtgtggaaagaagtcattcaagaactggaagaattgggtgtaggaattggcgtggtccatgctgggtatgagagacgcctggcccatcacctaggggcacacagcacgccctctatcctaggaatcattaacgggaaaatctccttcttccacaatgcagttgtccgtgaaaatctgcgacaatttgtagaaagtcttcttccagggaacttggtggagaaagttacaaataaaaattacgtcagattcctctctggctggcagcaagagaataagcctcatgtccttctgtttgaccaaacgcccattgtgccactgttatacaagttgactgcctttgcatacaaagattatttatcatttggatatgtatatgtgggtttgagagggacggaagagatgacaaggcggtacaacatcaatatctacgcccctaccctcttggtctttaaagaacatataaacaggcctgccgatgttatccaggcccgaggtatgaagaagcaaatcattgacgacttcatcacccgaaacaaatatctattggcagccaggctcaccagccagaagttgttccatgaactctgccctgtgaaacggtcgcatcgacagaggaagtactgtgtggttttattgactgctgagactaccaagttgagcaaaccctttgaggctttcctgtcctttgccctggcaaacactcaagacacagtgagatttgtgcatgtctacagcaatcggcagcaggagtttgccgacaccttactaccagacagtgaggcgtttcaagggaaatcagcggtgtctattttagaaaggcgcaacacagcaggaagggtggtgtataaaaccctggaagacccttggattgggagtgagagtgacaaatttatcctcttgggctatctcgaccagctgcgtaaagatccagctcttctgtcctctgaagcagtgcttcctgacctgaccgatgaacttgcccctgtttttctccttcgatggttctactctgcttctgactacatctcagactgctgggatagcatttttcacaacaactggagggaaatgatgcccctgctgtccctgatcttctctgccctcttcatcctcttcggcactgtcatcgttcaggctttcagcgactctaatgatgagcgagagtcaagccctccagaaaaagaggaagcccaagagaagactgggaaaactgagccaagcttcaccaaagaaaacagcagcaagattcctaaaaaaggctttgtggaggtaactgaactcacagatgtaacatacaccagtaacttggtacgtctgaggccaggccacatgaatgtggtcctcatcctgtcgaattctaccaagaccagcctactacagaaatttgctttggaggtctacacatttactgggagcagctgcctacacttctccttcctgagtctagataaacacagagaatggctagaatacttactagaatttgctcaagatgcagctccaatcccaaaccaatatgataagcatttcatggagcgtgactacactggttatgtactggctctgaatggccacaagaaatacttctgcctcttcaagccccaaaagacagtcgaagaggaggaagccatagggtcgtgcagtgatgttgactcttccctctacctgggtgaatctcgagggaaaccttcctgtggccttggatccaggcccatcaaaggaaagttgagcaagctctctttatggatggaacgcctgctggagggctccttacagaggttttatatcccatcatggcctgaactagactgagaggattttccaaagagatttgaactcttcagactttttaacatgcccctgtgaacaggtattttcaggactcaaactaccacaatgaacagagtatagattttagattgctcttctagaaccatggctagaagaatctttcctttgtcctgttctaacctaggaatgaaaaacaccaccagtttgaatcgcctagatgaaaatcttttcctctgggtgttatttttccccactgaatgccacaccattgaaaatagactgctcatcccctcttcctttcttgtccttgtcccatgctcaccccaccctcctgtcctgtgtcttggagaagcacagggctccaccctgcaagcggcatctggcggaccctcatgagcctgtcgtgcaggccaggtcattggccccttccccaatcccggccctgctgtgctgctgccatggcgcatgctcctaactctgaacaacccacggcagcttctagccccgcatctggaaaaaggcccctttccaagcaatctcacgtttactggttgttctgggagtaagtggctaaatgtatattttgggggtatcccccaacaacagtttgttggccacaggttgaaaaggaaaggaataaacgggagttctgcatgtgagttctcaagaaaaggaaagggaggctgagcagtggctgaagcgatgcagccttgagacacgctgtgagcatcccatccgccgccccagcgctgctggtagccaggggaggggtctgcacagcgagaagtactgtgatgactttgagccgttgacatgtatgtcttcagatgcctttctgcctctgtcgattttagggtatggatattaggagccataacttgtaatcttgttctctgaacgtagagataagctgctataaagccagtagatgttaaactgaagagaaattattcccacctgctatgagtcaggcttaaggaatctcttcaatagtgtctctttagtaaaataccaaacatgtctttgtatcaaggaacttaaaatttctcaacaattgtattttgaacactgttaccctaaaagtgctgtctcttcaagtcatcttttgcaggaagtgagccaagatttgttctagactcccattttgcaaaaggcttactttccacttctgggctgtattttgatgtctcatcttcattgttttcactcttaacttagagctgcttcaccagtattggggtcagactggccatcagcacctgagcgtgctgagctccaggtatagtggaccccagggtgcctcataccagccagttagagagcataccttttatttttcagggcagaatgaccagtggttctgagtttgagtttggacagcttcaaagagtggtccgttcaaatgtcaaagcaaggtgcctttggtggctttgtgaagggtgaaaatcagtgatgggacatttactaagtatttctttttttttttttttttttagttgttgagacagagtttcactcttgttgcccaggctggagtgaaatggtgcgatctcggttcaccgcaacctccacatcccaggttcaagtgattctcctgcctcagcctcctgagtagctaggattacaggcatgtgccaccatgtaattagcccggctaattttgtatttttagtagagacgggatttctccatgttgatcaggctggtcatgaactcctgacctcaggtgatctgcctgcctcagcctcccaaagtgctgctgggattacaggcgtgagccaccactcccggctaagttagtatttctttaatcttaatgctttaaactaagccacttggatcctgaataatttaaatcttgagctacattggtaagtaataaattatttaaggccaggaattcctgtagttttcatggagtctgtagctttattaaaaaataaatcactgccaggcttcattcttccatatgatcctctaaaaatggacacttcctctgaatgctgtatctcatggcacctggtccaactagaaatggtcaaggaattcatttggctccttgatacatcagtcctcaatattactttctaggtattttatggccagattgcttatatgagtggtcttttggtttggtagtaggtttttatttttaatttctgtactaatgaaattcctgactttaatttctgaaaaccaaaaactctccaagtgtatttatttatattttttttaatagagacgaggtcttgctatgttgcccaggctggtcccaaactcctggcctcaagcagtccttccaccttggcctcccaaagtgctgggattatcaatatgagccaccatgccagatttgttcatttttaaacatttttatctcttcaagtcatcttttgatcttttaaaaagcaccttcaaacagctgcaccttccatttgcactaggaaatgaaggtagtgatgggattggcaatgttcctggcagatgtttcagcccaaaagctcttctacagaccggtttagagctggtgccctatgagaatattagggagcttttattttaaattgaactttacccttgtccatgcaaggcattcctcctgaatgcatccatgaatttgtttacttttgcgtcaaacatatgagccattgtcatgctcagcctgtgccaccattgctctgtctgatgtatgtaatcatacaagacctgattttggttctaacacagtggtctttgactatcaacattgatgtttttagagatgggttcttctggttgatacagactatgcattgcgtttagcagatggggtaaaactggcctaaaacaagtctttgcagaatacatgccaatttccaaaaaaaaaaaaaaatttgttgctcaggtgttgcacaatttttatctaacactgaggctatcagctccaactaaacaacatttcagtgggtgaggctgccctaacttccattaggggccatggtctcactgccatcacttattagccatgagaatttggttgtagttttcaggtaggttggtttcttcctcatttgcagcttgttgatacttgttcctttttatttattaacatcccaatcaatttgcagctgccatcattacataaatatttttctgttataaaaagaagtgtgatctgtttttttagtgatttcctttgtttgggaatagagattggaagcacatactcagacctgttttgttaactagaattctttaaaagctgatgccaaacatctttacagaggaactgtagttcacatccacctgtctgacattgtcccctaaaaacaagtgcagtgtggcagctgctgaatctgtctgttcagtttgtcaaggaggataattatgcttgggagagatctgaaaagaaggtgaatattttgcacttttgatactcttaggaacaaataacttatttggcaaattgtttcttttttatgttttgggtgttgtttttgttttttgactttttttgtattgtgaacaggcactgaagctgatgttattttaagattacagaatggaaaaagaaataaactattttaatgtctgataaaaaaaaaaac

SEQ ID NO: 4623 - DNA, 389 bp, Homo Sapiens
ttttaaattcttggctatttgggcctcctctttgtacttatagcatttaatatagtctgtgtcatggtaaagttatttgtgtatatattttatattccatgtgatccctgaagtaggaaacatgttttatgcttatgttactgctgcagctgctattaccacttctactactgccttacaactgcttaatatttcacagttttcagagaactttcatgtaagtactagaattggcctgtctctaaacattcccctaaatggaacacagaaagtagttttgattcctgttctgtggagtacatgtagggcatgctggcagataaagtggtattagaaacttccctatctctagttgctaaaaatctagtagtaaaaataggaagacatgt

SEQ ID NO: 4624 - DNA, 405 bp, Homo Sapiens
gagaagacgacagaaggggtgattggatggaaagaggccagaaaccccagcctgagagactgctgtgcaccccacagtctgactgcacagagccgcctctgttggcaggaggcactgaggctccccttcctgtgtattgagaagcagtgtttgccaatatattttgctttcaattccaagaggagctctgggaaaacctgtggataaaaccaaatgccaaatgttggacgttgtttccttttccttttctctctctgattgttttaattgttctgtggtggttttaatggatttgagaccctggagcggcagctgcctttctgatttccagctgctttttgtgaataattcaaaaaaaaaaaaaaaaaaaaaaaaaaaagtcgtatcgatgtcgagcgatcatga

SEQ ID NO: 4625 - DNA, 547 bp, Homo Sapiens
gcggccgcgaccccggccccggcctcggccgtggcgagcgggtgggtcggggtcctgggggcggtgggcatgatggggctcgtggccctcagccgggcgccggcgcgggagcagcccagggccgctcgctgacggcagtgtttggggccgggtgctggggaagcggttccggcgtcccgggaattggtgggaagagccgcttctgtcacacgggtcgtggtaatggatgacaggaagtgccgggcagggtctgggcgccctgtgggtttgcaccttccttgtgagggaaatcgtgtcacttaacgaaaaatgaagaaacgcggagtctgctttatgtcatcctcgtggctctcgaaatgccttatttggacagtggctctgcgaccggaccagttagggcctccgttccgatggcggattcctgacgggaggccccagggtcccgggatgtgtgcgtccctgggtcgggcccagggcaggccaggctgagcgccacggcggggccgcagcccttgtggcgtttcacactggtgtgtgggtctcttcc

SEQ ID NO: 4626 - DNA, 296 bp, Homo Sapiens
ttttttttttttttgacaatcacccagtcagtatttattaggcgcctactgcggacggttggtcttcacgcaaatcaggcgaaaagggatagtgatgagcgggccgctgcggagacccggagcccgccgcggatcacgggaatttcgcgcctattttttgttggctgggtgttctcgccagtgattgggtcccggcaaggcgtgccggtgcgctcggctgcggctgctccgtcgacctttgcaggaccgggcggggcagggctcactcggctggcgtcccgggggatgggccacca

SEQ ID NO: 4627 - DNA, 443 bp, Homo Sapiens
ttttttttttttttttaacacaaataagtatcttttactagttccaaaaatgtagatttttttaaaatgtggtctagctgcaaaaattatacagccgatgccagtgcgacacaaagaaaggtgaaacttccataaagacctgtaggcagtacacaatttttttaaaagctaaaagaaataatagtatgaagacaaaaaagagaatctaccaaattaacgatttgaggattcactgagcaacaggataaacatggaatgcttgggatatccatttagttaattaaaataagtagttcaggtagaataagccaaagcgggttttgtgaaagtccctgtgttgcaggatacctgcaaatctgctttgagcatggcattaatgtgcaaggtctataaccttcccacccaaatgggatgggctgctatcagactccttaccactgaaa

SEQ ID NO: 4628 - DNA, 415 bp, Homo Sapiens
gcggccgctcaaccatcacagaagatcacagccaccaaaatccccaaaagcctccctaccaagccttcggccccttctacttcaattgtgcccatcaaaagcccccatcctacccagaaaacagctccatcttcatttacaaagtcagccctacccactcagaagcaagtgccacctacttcccgtccagttcctgccagagtctcccgtcccgcagagaagcccatccagaggaacccgggaatgcccaggcccccaccgcctggtgcagtgggagaaccgggccttcctggggaagccgggatgaagggtgaccttggacccctgggcactcctggggagcagggcctcattgggcaacggggagagccaggccttgagggtgacagtggccccatgggacctgatgggctga

SEQ ID NO: 4629 - DNA, 386 bp, Homo Sapiens
  misc_feature (386)..(386): n is a, c, g, or t
ctgtaggaatacggcacgagcatctcataaaaaaaaaaaaaaagatattaggtcctataatatttaaaatgtgtcttcataatcataggtagctaggttataaactatataaagacaagatcacgtgataagcttataatcttctcataattccccttacttagcattgtgttagacatactaataggtgcacagtgaaatacttataggtgattggttaaaaataaagttttagaaaaccttttcaaaagtcagagtttaggccaggggcacaggctgacacctataatcccagcactatgtgaggccagggcgggcagatcacttgtgtcaagagttcaaggccagcctggccaacatggcaaaaccccatctctactaaattn

SEQ ID NO: 4630 - DNA, 389 bp, Homo Sapiens; identical to SEQ ID NO: 3723

SEQ ID NO: 4631 - DNA, 310 bp, Homo Sapiens
agcggccgcgtggccatggacggcctgggcctccagttccccgagcagggcttccccgccggcccgccgctgctgcctccgcacatgggcggccactaccgcgactgccagagtctgggcgcgcctccgctcgacggctacccgttgcccacgcccgacacgtccccgctggacggcgtggaccccgacccggctttcttcgccgccccgatgcccggggactgcccggcggccggcacctacagctacccgcaggtctcggactacgctggccccccggagccttcccgcggtcccatgcacccccgac

SEQ ID NO: 4632 - DNA, 526 bp, Homo Sapiens
ataattactcttactctatattcaaggacccagttcttcatcttctcaagaagaaaccagaaaggctaaacagtgttctctaaaactaaagaacagacactctccaacataattctttgtcacttcccagaatgtggaaaagtcattgttattaaaacatcaccccttttccgtcccactatgcaaaactcatatgctgagtggagacttaccctggaaaatgttacaaccaatgcaaagttggttgtctgcccatttgtcaccgcccccaaccctccacccaccaattcttccttgcactcagaactccagatttattcaggtacaagcagcaatgggaagcggaagggaaggaacatggacaacatccgtatcacttgtttaaaactgctcgttgatgaaaagttttggaaataggtagtagtgatggttgtacagcattgtagatgtaattactgccactgaattgtacacttaaaaatggttaaaatgacaaaatttgtgttacatatattttaccacagtt

SEQ ID NO: 4633 - DNA, 238 bp, Homo Sapiens
ggccgcccacggccccgcgcccacgtcacgcgcccgccgcgcatacctacataaggcagccggggcgactggcgcggcgaggcccccgatgaacagggcgggctggacggggctaagagcggcacttggtgttcgggagaggctagtccgaaccgcgctccctcccctccagagggctccgtggaaaacgcgcgagccagctggcggcgtgtgcacgtggtgctgggcttgggaatat

SEQ ID NO: 4634 - DNA, 478 bp, Homo Sapiens
cggccgcggcccagtccaggctccctcccgccctcgcccagaagcgagggtccgagtggccacgtgtccggcagggaagtccgaggtagcgagggagtccacctggccgcccgctccccctcccgggtataaatcttggggaccggaaatacaataaaacttcaccgtgttgatgaacttcaaacggtttacatcccctcctgtcctgaaaagaaagacgtccgggggcggattaaaaggaaggggaaacaaatttacgagcggcagaagcacccgcctcggcccctttctttgcccgcacactttgtccgcgtggagagaagcagccccagcccccgggacttggcctccgccgaaccggccgccaggcgcgctcttctctcggaggagtcggcgctgacccagcccgcgcccggcagagactggaagccgccgcctacacggaaaatccacagagccccgcgcagaccctatgatc

SEQ ID NO: 4635 - DNA, 477 bp, Homo Sapiens
tttactctccttgctgtaacaccaaagaatgaagagtcaggttgatcttacctgtaatctgtacataagagctgagctctcctgggattcacagcagagagccagattttggattgagaatgtacagaaaacccataggagacattttctgatctgtgagatgtcagcatagaaatcttaaagccctcctttcagagtgtatccctttgagctttccagatcttttccagtgacctgctatgtttatgtgagaggctgctggtgtaaatagaatctggttgcacaatctgtaagtgtaaacatgcatgtcagcagggagagatcaaagccacaaaatacccagagaaatgacataagtttacttatttgtaaaatgtgatactggagtagagtattcttgtcctttctcttacctaagacctagctaatcagaacaggtgatatcacacatagatccaggttctggagctgtaccag

SEQ ID NO: 4636 - DNA, 463 bp, Homo Sapiens
tcgggccccggcccccggcccgcggcgcggggctcccgggccccgccgcggacgtcgcgccggtcgccccttccccgtagcccgtgcgccctcggcgcggagccccggcccgccgcggtcccgtctcctgggcctgtcccgcccgcgccctccgccggccctcaggtataatacttctccacgtctgcttcaggaagaaagtgcctgccattcttatcatttctaagcaggttcatgccagcccagaacagagaatcagaattagaagtgcgtctcaccaaccagccaagatgaacatggtgaagaggatcatggggcggccgaggcaggaggagtgcagcccacaagacaacgccttaggactgatgcacctccgccggctcttcacggagttgtgccatcctccccggcacatgactcagaaggaacaagaagagaaactgtatatgatgctgccagtgtt

SEQ ID NO: 4637 - DNA, 382 bp, Homo Sapiens
aagcttgcggccgcatccccgccgcggctcatctcgtcaggcgtgaagccgttcatgtctccgagctcccgaggccggcgctgacagaaatcccctctctcctggctgctccgcctctctccgctccggcagcggcaattcactctgcacaccaagttagacagcggcacggccaaacaccaactgtcccgggcctgctggtctctgctggcaccgaaacagtggacagtgctgagggccgggacgcagactcgagcgtctcctggagcggggaccccgctcactgtcaccctcgtgccgaattcttggcctcgagggccaaattccctatagtgagtcgtattaaattcgtaatcatgtcatagctgtttcctgtgtgaaa

SEQ ID NO: 4638 - DNA, 425 bp, Homo Sapiens; identical to SEQ ID NO: 3965

SEQ ID NO: 4639 - DNA, 741 bp, Homo Sapiens
tgtacgagcctgggtggtagttttttttttttttaacaatgttactagttataatttattctatgcattttataaaataaataaagctttaaaaaaatgaaggtgtgatgggttacagcacaggagaggtgtcctggctgaggcatgcttttgtggagacccccagtggggagggagggatgggagctgagggccctgccttctcccctgcaggaccaagcatccccagtcttgcacttgtgccagatgaatggaatggggtagaactgggccctgcagctcctagctctgctagatggggcccctaaaacccatagcttggtggccacctggcctggacctaggtgaggggacatgtgccccctggtgctctgggtctcacaatgaggcaggctgtttggcccccacccacaatttttgtcccatcatgggtcctccccacagttggggggggggagggtccttcccgtcaggacaagtcgctggaggcgcaaagccaggatggcagaccagtggtcggaagtgtgggtgcctgcgcttggtgtgcggtgccccccggtgccctatagcccgtgagccatgtgttgtctcatgggcccgcctctgtcacccctccagacctggtggcccacccgatcacgcgctctctgcgtgccagccgcggcgtgggtcccttaggtcctggcccccttgttccgggctgcccccccgtgtccccgaaggatccgccgtgtgctgggc

SEQ ID NO: 4640 - DNA, 438 bp, Homo Sapiens
tttttttttggggttggcatactttattagatacaaacccacactcacattttatatattattgatctctcaggtaaaaataagttttctttaaaaagtatgacttcatagctaatcatcaaaagctggtagaatgacctgattttaaactgctcttttaaaaaattcacaactaaagtgtagtgatgtcaagtatttacaacactaaaaaggaaagcagtgaaagttggtccagtgtcaactctggaaaggggcatcgtcagtgtagagacgagcaacgcaggggacaggcacgctcacccctgtgccagcagccgggccctgcagctctcgcggagcttggcgacggtggccatggataagcttccaggttctgaaaatattttctgcataaacgtgtgacactccatcacgaaactccctttggttatctgctta

SEQ ID NO: 4641 - DNA, 951 bp, Homo Sapiens
aaataaggctaggtacgaggcgggtgtgaatcggccgaggcactgccgtcgcgctgtcaacctccactactgcttgaccctgccgggattccccacccagcccttccccaccggactgtgtatatatttactataatgttagcttacaagctgggaatataagtgcattaacggccacatgagtcaatggtatgcaaaaagtctgtgttctcccaaataataatattaatcccacaaataacgacatgatccccgcccctgttcctttctgttattttttcttagatataagttttacattttttattccttttcctcttttttggtttgattggttggtttgagggagagttggggtcttgggttcttctagacgtttgttttcccttcctggggagtttcttgcatgagtcttaacttaaaactacgtttccgccttctctttttccctcttcccccttcattccctcttgtttccttccatttgcggttctgttttcgtttttgtttgtttgttctgttttttcctttgtgtacaagtaacagagaggaggttttattgtaactcatttgggggtggagggggccacctgggttggcagggcgccctggagctctattgacctggtacactgctccgggactcctcccccgccaccctccgcgcatagggtccttggtctggacctgccccccaaaagtagggccttgctcctctaccttgctctgagcacggacgagcctgacaccaccagtaaggtcggccccaagaagggccaagtgcccgcaacgcacttccagactcccgcctaaaaccagggtacagtgccctgtcgggacctggaccgtcaccggttgatcaaggcccaaaagccccgctgggggaacggccctacttggaagcgaaacacgggtcaccccgcggggcagaccccgcaggtggagagccaa

SEQ ID NO: 4642 - DNA, 445 bp, Homo Sapiens
tttttttttttttttttttttgagctcacgcacttttctatttctgccaccctggccgatgacattgcccctaaccccccagggggtgacagagactggtactgtcagtggccgtccaaagatgccgtcccaagaggcggtggactggcccgctccatttgcagagtcggtcggagccacgggaagatcttgagatgagctttaggtttggcgggcgcagtgctgaccgctgtagcccccttctgggagggtctcgtactttctggaaggagacaggggtcccagaaaggggcactccccagctctcctctgcatccagggtaggctcctggctcaccttccaatgggtgggtgtcctcttagaatttgcaaggaggatgagaacccttctcgggcaaagcctgtgcaggttgcccttcctccgtccttcccaggcagagtggct

SEQ ID NO: 4643 - DNA, 402 bp, Homo Sapiens
  misc_feature (369)..(369): n is a, c, g, or t
  misc_feature (388)..(388): n is a, c, g, or t
cagtgagcgacatcgcgccattgcactccagcctgggtgacgagtgaaactccatctcaaaaataaaaattgaaaaatcaggttacaaaacaccatttttcccgaaataagacaataagaggcttttctctgaattcctttatattgagcctttcagaattctccctgggtgggcaatttctttaaatagtatttgaccctcagatcaatcctggggaatttttttcatttgggtagcaaaagctaggagtattgctgtgggcgattataatacttttaaaaagttttaccattttaaagttgccaacatttaattaaggttttcctttggaagcctcctttaatttaggggagtaaaatgttaggctnaaaccattatattactatnatactattacactg

SEQ ID NO: 4644 - DNA, 447 bp, Homo Sapiens
tttttttttttttttctcttaatttttcaaatttatttaaaaattatttgaaaattacaacagatagatttcttttttttttccacttaacatgattattttcccagtcatttcatgttcttcaaaaaccccgatgataggaataattttctctttcctgaaatctctcttcttgtgattggatctgtttgaggtcctggacggaaaggcttggacgaagtccttgcagactcagcatggttgtaagcagtataatttcagagggctgtcccatgggctcactctgcaaccaggctttcttactggaagtcaacgttgccacgacaggattaaagcaagaagaaacattatggggctcctatctcgtccttaatgttcaaaacgcagggtatagcaaaggatataggaagaggtcgtcctcactcgtgaactcagcatcgggttcta

SEQ ID NO: 4645 - DNA, 2269 bp, Homo Sapiens
ccacccccggccccgaagctccgccacccgccgccatgagtagctttggagctggcaaaaccaaagaagttatcttcagtgtggaggatggctccgtgaaaatgttcctgaggggccgccctgtgcccatgatgatcccagacgagctggcacccacctacagcctggacacacgctcggagctgccttcttgccggctcaagctggagtgggtctatggctaccgtggccgagactgccgggccaacctttatttgctgcccaccggggagatagtgtactttgtggcctccgtagccgtgctatacagcgtggaggagcagaggcagcgacactacctgggacacaacgatgacatcaaatgcttggccatccacccagatatggtcaccatcgccacgggacaggtggcgggaaccactaaggaagggaagccgctgccgccccacgtgcgcatctgggactcagtttccctctccaccttacacgtgctgggcttgggggtgtttgacagagccgtgtgctgtgtgggcttctccaaatctaatggaggcaacctgctgtgtgcagtggatgaatccaatgatcacatgctctcggtgtgggactgggccaaggagaccaaggtggtggatgtcaagtgctccaatgaggctgtattggtggccaccttccaccccacggaccccactgtgcttatcacctgcgggaaatctcacatctacttctggaccttggaggggggcagcttgagcaagcggcaaggcctctttgagaaacatgagaaaccgaagtatgtgctgtgtgtgacctttttggaaggtggcgacgtggtcacgggggactctggggggaacctctatgtttggggcaaaggtgggaaccgtatcacacaggcggtgctgggcgcccacgacggcggcgtgtttgggctctgcgccctgcgggacgggacgctggtgtctggagggggccgtgatcggcgggtggtcctctggggttctgactacagcaagctgcaggaagtggaggtccctgaggactttggccctgtgcgcaccgtggcagagggccacggagacacactgtacgtggggaccacccgcaattccatcctgcagggctccgtgcacacaggcttctcactgctggtccagggccatgtggaagagctgtggggcctggccacacaccccagtcgggcccagtttgtgacctgcgggcaggataagctggtgcatctatggagctcagattcccaccagcccctgtggagcaggatcatcgaggaccctgcccgctcagccggcttccaccccagtggctctgtcctggctgtgggtacagtgactggcagatggctgctgctggacacggagacccatgacctggtggctatccacacagacggcaatgaacagatctcagtggtcagcttctccccagacggggcgtacctggccgtgggctcccacgacaacttggtgtacgtgtacacggtggaccagggcggccgcaaggtcagccgcctgggcaagtgctcgggccattccagttttatcacccacctggattgggcccaggacagcagctgctttgtcaccaactccggggactatgagattctgtactgggacccggctacctgtaagcagatcaccagtgcggatgctgtgaggaacatggaatgggccacagctacttgtgtcctagggtttggggtgtttgggatctggtctgagggggcggacggcactgatatcaacgctgtggcccgctctcatgatgggaagttgctggcttcagctgatgactttggcaaagttcacctgtttagctacccctgctgtcagcctcgagccctcagccacaagtacggtggacacagcagccatgtgacaaatgtggccttcttgtgggatgacagcatggccctgaccacagggggcaaggacaccagtgtgctacagtggcgggtggtctgatgcggccagggaagagtcaggtgtcagggcaggaattctattttcgggagatgtctattgccgagtagagtaatatatacccagagtatgtctatagcagagggggttatgggggcgggagggtagactgacatacagaagtctctatttatccgggtgggaagagggagtcacatcgctttggggatccattggtgtttggtttggggtgttttttaagttttttcttttatatcatccagaaataaagacacgtacactaaaaaaaaaaaaaaaaaaaaaaa

SEQ ID NO: 4646 - DNA, 394 bp, Homo Sapiens
  misc_feature (25)..(25): n is a, c, g, or t
  misc_feature (32)..(33): n is a, c, g, or t
  misc_feature (48)..(48): n is a, c, g, or t
  misc_feature (51)..(51): n is a, c, g, or t
  misc_feature (62)..(62): n is a, c, g, or t
  misc_feature (77)..(77): n is a, c, g, or t
  misc_feature (271)..(271): n is a, c, g, or t
  misc_feature (299)..(299): n is a, c, g, or t
  misc_feature (327)..(327): n is a, c, g, or t
  misc_feature (337)..(337): n is a, c, g, or t
  misc_feature (356)..(356): n is a, c, g, or t
  misc_feature (363)..(363): n is a, c, g, or t
  misc_feature (371)..(371): n is a, c, g, or t
  misc_feature (392)..(392): n is a, c, g, or t
ctccacaggtaggcgcagtcagctngagctgnnccggcggtccgcttncgntggagggcgtntcctgcggcgcgatngccgtagtgttgccggcggttgtggaggagctcctgagcgagatggcggcggcggtgcaggagagcgcgcgaagtacgggaccgagttcctgatgaatatctgttatcgctgaagtttctctttggctcatcagccacccaggcctttgacctagttgatcgacagtccatcaccttaatctcatcacccagtngaaaggcgtgtttaccaggtccttgganagttccagtaaaacatacacatgttttngcttgttgtnattactgttgcatgtcctngcatttngcattttncagtgtctaagggaagagttnac

SEQ ID NO: 4647 - DNA, 495 bp, Homo Sapiens
acagacgtgtgaataatattcatttttgaatcaagagcttaagaaattaggatggctaccctagtctaggatcctcatattactaatttcttccgcctccacaaacactctgggtagggagattctgccattaactagctctgctgtcctaagcaggtggcttctttctgcctcacagccctgttcctcctctttgaggtgtaggtgctggacaggatctcctatgcctccagccctaacgttcctctgcctgtctgcagggggatgcaggagggtggctgcgggaccactgccttcagaccggggacgcctttctcatcgtcttctcagtcaccgaccgacggagtttctccaaagttccagagaccctacttcggctccgggctgggaggccgcaccacgacctacccgttatcctcgttggaaacaagagcgacttggcccgctcccgggaggtatcactggagggtgtgtatcctgaacagattccatact

SEQ ID NO: 4648 - DNA, 635 bp, Homo Sapiens
aagcttgcggccgcagcgctggtggccatgctcttggagcactacggcctggcgggccagccctcgccgctgccgcgccccgcgccccccaggaggccgcaccctgcgccagggcccggagacagcaacatcttctggggcctgcagatatccgacattcacctgagcaggtttcgagatccaggcagagcggtagacttagagaaattctgttctgaaactattgacatcattcaaccagctctcgtcctagcaacaggagacctgacagatgccaaaacaaaggaacagttgggatccaggcagcatgaggtagaatggcaaacctaccagggtattctgaagaagacaagagtcatggaaaaaaccaagtggctggatatcaaaggaaatcatgatgcattcaatattccaagtctggacagcatcaagaattattacaggaaatattctgctgtacgtagagatggctctttccattatgtccacagtactccctttggcaactattcgttcatctgtgtagatgccactgtaaatccagggcctaagagaccctataatttttttggattttagataaaaaaaaaatgaggagctcttttacttggcaagggaaacaatccgagcaacca

SEQ ID NO: 4649 - DNA, 486 bp, Homo Sapiens
  misc_feature (453)..(453): n is a, c, g, or t
  misc_feature (462)..(462): n is a, c, g, or t
  misc_feature (469)..(469): n is a, c, g, or t
tttggaaccgcggttgtttaaaagcctgagggaacctggaggggggctcccactctctaccttctttcctccgagtttgtgactccgagatggacaaagtgtgtgctgtttttggaggctcccgaggcattggcagagctgtggcccagttaatggcccggaaaggctaccgactggcggtcattgccagaaacctggaaggggccaaagccgccgccggtgacctcggcggagatcatttggcatttagctgtgatgttgctaaagaacatgatgttcaaaatacatttgaagagatggagaaacatttaggtcgagtaaatttcttgggtaaatgcagctggtattaacagggatggtcttttagtaagaacaaaaactgaagatatggtatctccagcttccatactaacctccttggggttccatgctgacctgtaaagctgccatgangactatgantccaacnacaggggagggtcttat

SEQ ID NO: 4650 - DNA, 522 bp, Homo Sapiens
taccctatattagcaaatcatcagtgttctaactcggagacatgggcagctgtccaaaggaagaattaaacaaatcattccagtcgcaggaaaaattcaatttactgcatgcagactgtttcttgactgaaaagttaattcctttcattcagaatcagtatgcatattcactggctatatttcatctcacatctgcaaacttaatttttcctttcttggtcatcagaagattaggaaataaattttagtccaggcaatagatcctacttggcaagctcaaaataactcaattattaaaaagcagcacacaaagaccagtagtgacttccaaaggattgttaacaatacttaaaaaaaaaaaaaaaaaaaagaaaaaaaagggtccacctgtctaaaagaagactaaagatccttgaataagaaaatacaatgtttggcaattctgtccaaaatagtattgctgcatattaacccatcctttaagtttcagcaataatttcgaaaaaatagttcccaacaata

SEQ ID NO: 4651 - DNA, 474 bp, Homo Sapiens
tagttgtacagtattaactttatttagctattattacagaatgactgtttctgaaagaagggacaggaagggcaccctaaggccacagggcaaaaacagacaccaaaaaacaccacctcagaatcgacagaaaaaaacaagggtaaagagcgcagcagctaggcgatcgagacgcctcggggaaagcacagcgaagccgggggccaggaccggtcacagccccccaacccggcccggccgccacaggggtggatgcgcatggtgggcgtgggccaaggcggagaccgccgcggggactgggggcacgcgcacgccgcgctcggcctaagtcaggccggacaggactcccaaccagaggcccgaagcggcggcgcgagaggccagggacgccggccgtttgagggccaagaggggaggcctgagagaacccgagagacagagacaggaagtttcgtaccgccatagagccactct

SEQ ID NO: 4652 - DNA, 219 bp, Homo Sapiens
  misc_feature (10)..(10): n is a, c, g, or t
  misc_feature (29)..(29): n is a, c, g, or t
  misc_feature (31)..(31): n is a, c, g, or t
  misc_feature (75)..(76): n is a, c, g, or t
ctcgtgcagnagtgctgacagtaggtttntncttttaacctaatacagggtaaaaactttaatttctacattttnnttcccccattatctctgccaccatcccttagacttcaggagcataatgacccaggtagctagggtggaaactgagcatgtggaccctacatcttttggggagggtggtgaaaaactgtgtcatgtcaggttagatctgaatct

SEQ ID NO: 4653 - DNA, 423 bp, Homo Sapiens
gcggccgccccgtcccgccgccgccgcagcccgcctgccgcgcgcccacagcccggcccgagtcgcggggcccgagcgacagcgacggcgccggccggggccgcggcgcgcggaagccactttgcacggtcagcgccgggcacaagtttgttccgcggctcccgggggcctgggcgctgagggagaatcgcgctgagggggccaggaggagggggagagggaggcgccgaaaggcacaagagtggggaaaagtgcggaaagaagcaacagccgctccacccgggaccagaaaagtggccagtgcgtcccggccgcccgccctgcgccggggatgcggcggcgtctgcgccggctaacggtccagggaggcggcaggggcggcgggagccgctaggcggagagagaccaggtgatgtacctgct

SEQ ID NO: 4654 - DNA, 368 bp, Homo Sapiens
gcggccgccctgccccctggcggcgcgcgccgctaccgcgccctcgggctcctccggctcccggcgcgccccgcgcatgctgcccactgcgccgcggaggttggtcatgctcaggtcgagctcgcccctcgggatctcctgggagccgcgttcccccggaggcctctgccagctgcagctcgcgccctccgcgtccccgcccctatcgcggcccccttgcaagggcagcagcgcgaaggcgctcagcgaggagtccacgaaggagctggccgtgctctggcgcccccagctctcgggtgggctgcagggcgccggactgctgcagctgctagcggctgcggcggcggtggcagcggcggcccggcgac

SEQ ID NO: 4655 - DNA, 573 bp, Homo Sapiens
atttggccctcgaggccaagaattcggcacgagggccgctcattttttttttttttttttgttttgttattttttcttgtccacttgatttgcatgcaacacccacaaaaaggaaacacaccccctcctgctttggccaccccagcaggctccggggggcacctggcctgggtccccggtgcactcacccggtccttcccagtcctggacctcaacgtggactgggccaggtgtgggtgagtggagggacggccaggggcacgatgggagtgaccgcctcgcacccccacccttagcccggcccccacccctgctggagcttgtcacacgtcctcaaacccccacatccactccctctgccctccatccctgactccctccggacccctcccttggccccgctccgtcaccgattccctccggtcacctgctctgcaccatgccccaagaccaccttccctgaaggccattctgtgcggccagggccccgcagacccctccacatcccctgaggtctttaactcaccccaagctgtggcccccgggagaccccagagcaatagcccccaccca

SEQ ID NO: 4656 - DNA, 523 bp, Homo Sapiens
  misc_feature (22)..(22): n is a, c, g, or t
  misc_feature (62)..(62): n is a, c, g, or t
  misc_feature (94)..(94): n is a, c, g, or t
  misc_feature (96)..(96): n is a, c, g, or t
  misc_feature (163)..(163): n is a, c, g, or t
  misc_feature (434)..(434): n is a, c, g, or t
  misc_feature (485)..(485): n is a, c, g, or t
  misc_feature (506)..(506): n is a, c, g, or t
  misc_feature (522)..(522): n is a, c, g, or t
cacagggctggaggcaacacanggctgaacccctgtcagcctgccgggggacgcggtgcccncctccggatccgggaaacacagcgtcccagcngncgcctgcaggtcgccacacttcctggtcctctctggctgcgtctgagggccttagctctggcagggngcctgcaacgggctcagcttctaggggtggcgggtgaaggctacacctgccccaggacggccaggtccaccagcacctgcaacagacggagaactgaaggagcatcttgaagctgtggcgggtgaaggctacacctgcccaggacggccaggtccaccaagaccttgaacaagacggagaactgaaaggaacatcttgaagctgttgctgtcttgaaggtgtcgccgcttgtcctcacgagcaccattttgattctcgtggcctgttgtgnatgggttggcaagcgtttctgttaagggctccttgaacgctcaagattggnctttcagggaaagttcaaggntttccgaagcagaaana

SEQ ID NO: 4657 - DNA, 488 bp, Homo Sapiens
agtctggctctctgaggtccaacccttattccccaaggtccagatggcggcaacgtgggtgatcaacgtagcacagattggtcttctcagtacagcatggtggctggggcaggccgagagaatggcatggagacgccgatgcacgagaacccggagtgggagaaggcccgtcaggccctggccagcatcagcaagtcaggagctgccggcggctctgccaagtccagcagcaatgggcctgtggccagtgcacagtacgtgtcccaggcagaagcctcagctttgcagcagcagcagtactaccagtggtaccagcagtacaactatgcctacccgctcgcgatcgggtgggtgtggccagaacgtgaaccactggacaggatatagctgttccagcttagggagcccactcgggcagagtgactggtcatatttcgaagccgtttctgctgctgcacatcccatagctgcacctcagcactgctggt

SEQ ID NO: 4658 - DNA, 949 bp, Homo Sapiens
gaataagcttgcggccgcccgaagaggagagagcgcgggcctctaggaaggtatggcctcacaagtcttggtctacccaccatatgtttatcaaactcagtcaagtgccttttgtagtgtgaagaaactcaaagtagagccaagcagttgtgtattccaggaaagaaactatccacggacctatgtgaatggtagaaactttggaaattctcatcctcccactaagggtagtgcttttcagacaaagataccatttaatagacctcgaggacacaacttttcattgcagacaagtgctgttgttttgaaaaacactgcaggtgctacaaaggtcatagcagctcaggcacagcaagctcacgtgcaggcacctcagattggggcgtggcgaaacagattgcatttcctagaaggcccccagcgatgtggattgaagcgcaagagtgaggagttggataatcatagcagcgcaatgcagattgtcgatgaattgtccatacttcctgcaatgttgcaaaccaacatgggaaatccagtgacagttgtgacagctaccacaggatcaaaacagaattgtaccactggagaaggtgactatcagttagtacagcatgaagtcttatgctccatgaaaaatacttacgaagtccttgattttcttggtcgaggcacgtttggccaggtagttaaatgctggaaaagagggacaaatgaaattgtagcaatcaaaattttgaagaatcatccttcttatgcccgtcaaggtcaaatagaagtgagcatattagcaaggctcagtactgaaaatgctgatgaatataactttgtacgagcttatgaatgctttcagcaccgtaaccatacttgtttagtctttgagatgctggaacaaaacttgtatgactttctgaaacaaaataaatttagtcccctgcctcgtgccgaattc

SEQ ID NO: 4659 - DNA, 602 bp, Homo Sapiens
ggcctcagctcctggaaggtgacgcggtcgcgggcagtgaggcgcgcctgacctagtgggagcgcgggacttgtggggcgcccgatgggacccaggccggggctggggagaagtgcggcggcctcccctccgcctggccgacgcccgggaaaggcgctgctgaggtggccgcccaccgcccacaagcagcccggcccggcctttcctaaaacggagtcggtgctgcccgccgaggcgctctctgggagaagcgggaacctcggcagccaagcctcagactctggggctgcggccgcggcgttgggcggggctgctctgtggagaggcggagcccttgaagttactcagaactggagcggggatgccgaggggaggccttggcggcgctggactcggccggaacagggaacctcgaagcctcctctccagcaaagagagaaagaaaagttggggccgggcgtggggtgcgggcttgtaatcccagcactttgggaggccgaggcagtaggatcgcctgagctcaggagttcaagaccagccaggtcaacatggcgaaaccctgtttctacaaaaaatgaacaaatcagctgggcttgggggtc

SEQ ID NO: 4660 - DNA, 407 bp, Homo Sapiens
taccacacggaccagatgtggtctggacacactagaggaagttaaaatcctttgccaacctaagcagtaatccattcctcagtgcagcagaagcaggaagaattcccataccccagctccacctagtctactatggtcacctttcccctacaactgcctaagcccaagttgcatctaaaggattggcccagggcccaccgcctctaggcttcttacctatgtagctctgcagttgtctctgtaggcggggaaagaaggaagatgatggtccgctccctggcctgaagcatcctgacggtaggacacgtgaatggcacccttgccaagcagagtagggttgacacgcagatgctgttgctgctcaagtcaagcttccggagccgtggttagtgagggagaacaccacc

SEQ ID NO: 4661 - DNA, 570 bp, Homo Sapiens
  misc_feature (456)..(456): n is a, c, g, or t
  misc_feature (509)..(509): n is a, c, g, or t
tgcagtgttttttccacaggaagaaaacagaaaacttcctggggcagtgttggaccctgtgaggctatttgctatcctggaaagttcattagaggcctgcgtatcagatatatccccagagataaagtttaggccaaggttctctggaatctttcccctccgttcatctttatgtgcttcaaattgtatgtggccctttttcacactagtcctttttggattatcagagctctttctggctcgagatttaagcgcaaggcttttccttctcatctgcagaatgttcagaatcaaaagccagtgatttcaaacagccattaagcaacaggtcatgttctgactcaggatcatttgtgcagtcttcaaatggcatatcttcttcactgtccaacttggattgaaccaggaatacattttcggttctttgaccccttgggaacatcatactgttctgcnagtccaacactggcttccatttactcaaaattttctgaggaaccttatgccanatccttttcctttccgtttcctcttctcctaaggacaggtagctcttcgaattcctcgtgc

SEQ ID NO: 4662 - DNA, 183 bp, Homo Sapiens; identical to SEQ ID NO: 4383
  misc_feature (43)..(43): n is a, c, g, or t
  misc_feature (159)..(159): n is a, c, g, or t
  misc_feature (175)..(175): n is a, c, g, or t

SEQ ID NO: 4663 - DNA, 409 bp, Homo Sapiens
ttttttttttttttttttttttttttttttttttttttttttttttccggcagcaggacatgctttattctgagcaggctgggcccttcggccagcggttgaaagcacaaactggggggggctgtcgcccacaaggtccggcctagggaggcagggttcgtgcctaacaaaccctccggcagggatgcaggtgtgcgggggtgaaggaggggcttattttttccggaaaatcaggcatttgttgttggctggcatgtccaccatcctttccaggagcaggccactggcctttcccaggtcctccaggagggctgggtcccgaaccccccattctgggttcctgcatttgagcatcaggtcaaagcccacgttgctctggggggaaatcttcccattgatggcatagggc

SEQ ID NO: 4664 - DNA, 629 bp, Homo Sapiens
  misc_feature (566)..(566): n is a, c, g, or t
  misc_feature (595)..(595): n is a, c, g, or t
ctaaaatctataagcatgctggaaatattaaagaagctgcaaggtggatggatgaggcccaggccttggacacagcagacagatttatcaactccaaatgtgcaaaatacatgctaaaagccaacctgattaaagaagctgaagaaatgtgctcaaagtttacaagggaaggaacatcagcggtagagaatttgaatgaaatgcagtgcatgtggttccaaacagaatgtgcccaggcttataaagcaatgaataaatttggtgaagcacttaagaaatgtcatgagattgagagacattttatagaaatcactgatgaccagtttgactttcatacatactgtatgaggaagattacccttagatcatatgtggacttattaaaactagaagatgtacttcgacagcatccattttacttcaaggcagcaagaattgctatagagatctatttgaagcttcatgacaacccccttacagatgagaataaagaacacgaagctgatacagcaaacatgtctgacaaagagctaaagaagctacgtaataaacaaagaagagctcanaagaaagcccagatagaagaagagaaaanaaatgcagaaaaagaaaagcagcagagaaatcag

SEQ ID NO: 4665 - DNA, 258 bp, Homo Sapiens
gctaccgaccttaagtcgcgtgtgctccagcaagcatgctcacgtagagcgagatctaccagtggatcatggacctcttcccctattaccggcagaaccagcagcgctggcagaactccatccgccactcgctgtccttcaatgactgcttcgtcaaggtggcacgctccccggacaagccgggcaagggctcctactggacgctgcacccggactccggcaacatgttcgagaacggctgctacttgcgccgccaga

SEQ ID NO: 4666 - DNA, 218 bp, Homo Sapiens
  misc_feature (179)..(179): n is a, c, g, or t
acaccacgactgagaacgggattgtttaataagatcacaccacccctggggcaactaaagacatcttgagaaaatgtgccacctctcagggtgtgaggaactacagtgtccccataggcttggactccagagtcctcgtggatttagttgtggtgggatccgtcgccgtttctgaaaanggctggaggaatcgggaagggagaaggctacgcagtctg

SEQ ID NO: 4667 - DNA, 791 bp, Homo Sapiens
gcgctaggtagcaggctgggtttacttatttcaactcccgagtggctagactggaaaaagaaagaaatgatgtgaggaaagtcgggaagctctgcacagtgatccctgagagccctggcaccactttaggagacgtggtaggtcactctgtacatgtcttcctcagcaaggggggttttcccaaaagggacacaagaagaaatcttactcagtggagtaaatggaaagaagagggagcatgtctgtctggttccttcctatttctcctttcctcagagtcaagtttcaccccacagggagttcacgcttccatgtagcctcatccagcccttcaggaagccagagtctgtgctccagtgtggcatttcagccaacctagaaatgaagggtgacttagacacagagaggttcaacaagtggggcatgcaggccactgatctctgcaagggcagcagtgccggggtgctctgggatacaggcagtgccttcggaaagaagggcaattgaaagacagttgagaaggtgaacaaagtttacatctaacaaattttaaagttttattatttttattttaatatacttggggtctcactatatttgcccaggctggagtgcagcagctatttgcagtgctgaatcccactactgatcagaactggaggtttattttatttaattacctaatttattttgagacagagtcttgcctatgctcagctgaagtcagagtgcagatctacggtcaataagaagactccaggtcaatgactgtcactcactctgaaaaggaa

SEQ ID NO: 4668 - DNA, 423 bp, Homo Sapiens
  misc_feature (124)..(124): n is a, c, g, or t
tttttttgagaaaagcattggcaccgcagcagcctcccccgcttcttccctactaggacgcccgcctgactcgccccattgcacaattcttaccgtggaacagccgcgtgactcggcgggaccnaaaagtttcccaggtttcctcagcctagaaaagcgtgggttggtgtcccggcctggctccaggcgccctttaagttgtatttcttcgggtaactgggtggccctttaaaatgtggagattgtcctttagaaagaaagaaatctcacgagctcgctggcccgccaggtctaggttggcgccgggtgactgcaatgaaacgcgtttcttttcccatgtacattttcagacggtaaaagtgtttcgatttgtttgggggagaagtcaggcgctggttttaaaggaggaaggggaatgatgct

SEQ ID NO: 4669 - DNA, 506 bp, Homo Sapiens
tttttttttttttttttacactgtagcacatacatttaatatcaagcatcagtcctgtattccccagagcacaaagcttgtagaattggataatccttcccttatcttctgtttctatcacaaaacaaaacaaacacggaaaatacactttcattttccaaaatgttctttttctgaaaaaaagataatattttatttccttacactctgtttcaatccacaaaggaatagaggcagcttacaagagtgctttcaataaagtagaagctataaataaaaaatcagggtcaaagaaaatacatgtcacacaaaaaggtctaaaggaagaaggaagttgggacgtggacgggcaaataataagcttttactcactcatttaaccatgattttcctgatggaccatggagggaaggatggaaaaaaaagaatgagccaaagaatttacatagcacataaccagaaaccctctaactcctcagtgggagaaaataatatcgatgcaagac

SEQ ID NO: 4670 - DNA, 337 bp, Homo Sapiens
ctgtaggtagcaagtatgaattcctccatgacatctgggctacaagaaatgccaagcttggccactgctcacagtacccgggactcataagaatccatgcatgccttctcccatctaagacatgcgggatccatgccagggaagaatgaggcacatgccagaggatatgggggctgggaggagggcactaacccagagtgatttgaaatgaggtaggcattcaatgggcccctggcaaaaaagagaaagaaggacgaggggagctgaaaaatgtctttcatgggagaaagggaggggaggggaaggacaggggaggggagggggtgggtccaactgg

SEQ ID NO: 4671 - DNA, 457 bp, Homo Sapiens
gagaatgcagtctccctctctcaccaggctggagtgcagtggtgtgatctcggctcactgcaacctctgcctcctgggttcaagcgattctcctgccttagccaagaattcatattaaagcagtcgtcatttaatgaaattttggacaccctcacttcaggcacatctgctatcaggcaaaattctactcagcttttacactgtgtcagacaatgtgccagacactaagaatgcaaataaaacatagaacctgaaaagttgtgtttcttcaaaggatacatggagacataaataaaagctgtgttgataacagaaataagagtcataaaatgcttccaagaaagaaagtgggctcagaggtatttctttcagggtgagcaggtgtagaccagggagggaaagagttgtatttcaggcaaacacaatccatgagatggcctagtgagagaaggaaagt

SEQ ID NO: 4672 - DNA, 613 bp, Homo Sapiens
  misc_feature (471)..(471): n is a, c, g, or t
  misc_feature (476)..(477): n is a, c, g, or t
  misc_feature (526)..(526): n is a, c, g, or t
  misc_feature (537)..(537): n is a, c, g, or t
  misc_feature (599)..(599): n is a, c, g, or t
  misc_feature (601)..(601): n is a, c, g, or t
agttcctcggttgcactgaccacattttaagtgctcagtagctagtgggtcctgtattacccaggagcagactatcctttttaatagttgcatacgtttatttgctgataatgtttattgagtgcttactatattgttggctactgttaatcaggcttcatgtgttacctctattaatccctacaatgattctaaaagatattattctaaatgtacagaagaaatagaaacttagtgcagctattaaaaagcataactaagtcttaaacctaggtctttgacatgaaagatcatgctgtttccctctcctttaatgtggctctgttatgatttatttaatcattgacctaccagtagatattttggttattgtttattagtggaaattgcaaaccatgcttcagtgaccatctttgtgagcataacttacataattgtttcgtaaaaaattcaatgagaatacacatttcnaatanncattgccagtcatggatgggctcatgcctgtaaatcctaggacctttgnggagggccaangcaggaagatcaggttgaattcagggaggttcaagaccagcttgggcaacatagtgagaccncnactctaccaaaa

SEQ ID NO: 4673 - DNA, 502 bp, Homo Sapiens
  misc_feature (480)..(480): n is a, c, g, or t
gctatcatatgtttttaaaactaacactaaatacactttttggttcagatgttttatcctttccttgattttccccctgcataatgatctaattgtacacactatatatacttggattctgcatgtaagaaagtcatagatctttaggactaaaaggaacttacagagtatttaggccacatttttctaagctcagttttatgaaacagaaactagtgaacggtccttcacgttgcaaataattcactttcaaggtcttgtttttaaaactcatttgccacaattcagatgtaaaacagaactacagaagccaagttactttccagaaaattatctcttgagtacattcagaattattcatttaaccatatgtcccaggaaagatgccaaattcctgcatacttctgagcctgcccacatacagttccttctgtttagaccatttctctcttcctttacctaacaaacttcctatttatncctcagacactccctatcatat

SEQ ID NO: 4674 - DNA, 362 bp, Homo Sapiens; identical to SEQ ID NO: 401

SEQ ID NO: 4675 - DNA, 388 bp, Homo Sapiens
  misc_feature (299)..(299): n is a, c, g, or t
  misc_feature (343)..(343): n is a, c, g, or t
  misc_feature (355)..(355): n is a, c, g, or t
  misc_feature (364)..(364): n is a, c, g, or t
  misc_feature (377)..(377): n is a, c, g, or t
agcagcagttgtgtgactttaataaggttccaggattatactgtcccttttttgctgtgacttccctttgcccttttctgaattgtcttcatccccttttccacggggcatgacttcttaagaatgagccttcctagtgatgtaggatcagatggaacatacagtcacaaagtcatgtcttctacaatgatttctctgaaagcttttgaggaattgaggggccagggtgtgctggcagaggcctgtaatcccagcactttgagagtccaagggcaggaggatcacttggaaaccagggngtttaagacccagccttgaggcaacaaaggggagacccttgttntcttgcccagtntttccccgnaattaccaaaatngaccttcacgg

SEQ ID NO: 4676 - DNA, 389 bp, Homo Sapiens
ccaggagtcaacactttattttgttcaggccaaccacactgggagcccagcatccccgcaggatatgcctctgtgggctcatctcgcctcttgagggtggccatgctggctggctctggccaccggggaggcctggccagtctctctgtctccaagttattgtagagtcgggaagtcttcaagggcagcttcaaggaggctgaactggttcctacttctggaggtatttcttcattatgctcgcaacatgtcgtctttcctccccgtccctggtctctccgctcggcggacgttcgtcgcaccgtcaccgagtcgtgggattctgtccgacttttgatgctgtcagcacttttgaggaacgatgagcgagatagacgatcagcagtgac

SEQ ID NO: 4677 - DNA, 406 bp, Homo Sapiens
cggctgccattatgcaccgacccccatcgagcgccggtcctgctgcccgtctagttgggttccatctcttctgcatatttatgcttgcctgttacattccctggcctctgagtgtcctttggcagtttgcaaagcatttgggcaagaaggagcttgggcagcttcacaacatgtggggacgcgcaggggaggggccgcggcggacccgcacgagtttcaagggctggcgcgccggcggactttccacactgtctttcgggactggggttaggagacagcggttgcgcacggctgtgtccttactttgtcgctttacttggggcgggacctccgcgtgccagcgctggcgtgtgaccccgcaacgagcgtggtgtcgagacaccagcagctggggcggtgggagcga

SEQ ID NO: 4678 - DNA, 549 bp, Homo Sapiens
cgccggcacctggcactgtggccgccacttccgccgcctgggcgcaccggctcatagttgagccgggcgtagaacccggccgaagcgatctacgcgggcgctgcagccaaaactgagccgaagacctactagagtcccagcctagggcgacgctggggagcctctgcgcaggcgctgaagttacttagacgcctgctgctgccgccctgccccttcggctgtgacacgccccaggctctggccacaccccctcaggcatctggctccacccccttggtaatatagtccatcccctcggaggggaatgttttccttccgagccaagaccctgaagggtaccccaggatccctaacattccacagcgagacactaggcagagttccctgctttagggtcggacggacctggattttcaatcccttttactgggactgtgacgctggccaaatcactatctctatgaacctcggttgccttccgtaaaatgcagataaatgtattctcagataatcctaacctggatccagtaatgccattgagcaaccact

SEQ ID NO: 4679 - DNA, 412 bp, Homo Sapiens
gctcgacgttgagttgagaatttgtttcccccacccgtattgtttttggtgtttttttgttttgttttattcgttttgttttgttttaacatctctgtttccttcccctttctgttgttgctccttcctcctcccactccaactaccacacaaatcctgacaggagcctttctgcccctctagggaaggggcccgtgtgaggaactcttactggacgcccccttccctgttgctgtgctgatcttacacatcagtttccacggatcccatgtgaatcagttgtcttcctcatttactctgagcaagggtggcagcagcaatagcagaagacgtagatgcagtgactcattttgcatgatgtctgcaagagagccgggcctcccgtgtgctgtggctctcgttcaggcattgc

SEQ ID NO: 4680 - protein, 631 aa, Homo Sapiens
MFYAHFVLSKRGPLAKIWLAAHWDKKLTKAHVFECNLESSVESIISPKVKMALRTSGHLLLGVVRIYHRKAKYLLADCNEAFIKIKMAFRPGVVDLPEENREAAYNAITLPEEFHDFDQPLPDLDDIDVAQQFSLNQSRVEEITMREEVGNISILQENDFGDFGMDDREIMREGSAFEDDDMLVSTTTSNLLLESEQSTSNLNEKINHLEYEDQYKDDNFGEGNDGGILDDKLISNNDGGIFDDPPALSEAGVMLPEQPAHDDMDEDDNVSMGGPDSPDSVDPVEPMPTMTDQTTLVPNEEEAFALEPIDITVKETKAKRKRKLIVDSVKELDSKTIRAQLSDYSDIVTTLDLAPPTKKLMMWKETGGVEKLFSLPAQPLWNNRLLKLFTRCLTPLVPEDLRKRRKGGEADNLDEFLKEFENPEVPREDQQQQHQQRDVIDEPIIEEPSRLQESVMEASRTNIDESAMPPPPPQGVKRKAGQIDPEPVMPPQQVEQMEIPPVELPPEEPPNICQLIPELELLPEKEKEKEKEKEDDEEEEDEDASGGDQDQEERRWNKRTQQMLHGLQRALAKTGAESISLLELCRNTNRKQAAAKFYSFLVLKKQQAIELTQEEPYSDIIATPGPRFHII

SEQ ID NO: 4681 - protein, 1087 aa, Homo Sapiens
MMTSVGTNRARGNWEQPQNQNQTQHKQRPQATAEQIRLAQMISDHNDADFEEKVKQLIDITGKNQDECVIALHDCNGDVNRAINVLLEGNPDTHSWEMVGKKKGVSGQKDGGQTESNEEGKENRDRDRDYSRRRGGPPRRGRGASRGREFRGQENGLDGTKSGGPSGRGTERGRRGRGRGRGGSGRRGGRFSAQGMGTFNPADYAEPANTDDNYGNSSGNTWNNTGHFEPDDGTSAWRTATEEWGTEDWNEDLSETKIFTASNVSSVPLPAENVTITAGQRIDLAVLLGKTPSTMENDSSNLDPSQAPSLAQPLVFSNSKQTAISQPASGNTFSHHSMVSMLGKGFGDVGEAKGGSTTGSQFLEQFKTAQALAQLAAQHSQSGSTTTSSWDMGSTTQSPSLVQYDLKNPSDSAVHSPFTKRQAFTPSSTMMEVFLQEKSPAVATSTAAPPPPSSPLPSKSTSAPQMSPGSSDNQSSSPQPAHQKLKQQKKKASLTSKIPALAVEMPGSADISGLNLQFGALQFGSEPVLSDYESTPTTSASSSQAPSSLYTSTASESSSTISSNQSQESGYQSGPIQSTTYTSQNNAQGPLYEQRSTQTRRYPSSISSSPQKDLTQAKNGFSSVQATQLQTTQSVEGATGSAVKSDSPSTSSIPPLNETVSAASLLTTTNQHSSSLGGLSHSEEIPNTTTTQHSSTLSTQQNTLSSSTSSGRTSTSTLLHTSVESEANLHSSSSTFSTTSSTVSAPPPVVSVSSSLNSGSSLGLSLGSNSTVTASTRSSVATTSGKAPPNLPPGVPPLLPNPYIMAPGLLHAYPPQVYGYDDLQMLQTRFPLDYYSIPFPTPTTPLTGRDGSLASNPYSGDLTKFGRGDASSPAPATTLAQPQQNQTQTHHTTQQTFLNPALPPGYSYTSLPYYTGVPGLPSTFQYGPAVFPVAPTSSKQHGVNVSVNASATPFQQPSGYGSHGYNTGVSVTSSNTGVPDISGSVYSKTQQSFEKQGFHSGTPAASFNLPSALGSGGPINPATAAAYPPAPFMHILTPHQQPHSQILHHHLQQDGQTGSGQRSQTSSIPQKPQTNKSAYNSYSWGAN

SEQ ID NO: 4682 - protein, 576 aa, Homo Sapiens
MELENIVANTVLLKAREGGGGNRKGKSKKWRQMLQFPHISQCEELRLSLERDYHSLCERHAIGRLLFREFCATRPELSRCVAFLDGVAEYEVTPDDKRKACGRHVTQNFLSHTGPDLIPEVPRQLVTNCTQRLEQGPCKDLFQELTRLTHEYLSVAPFADYLDSIYFNRFLQWKWLERQPVTKNTFRQYRVLGKGGFGEVCACQVRATGKMYACKKLEKKRIKKRKGEAMALNEKQILEKVNSRFVVSLAYAYETKDALCLVLTLMNGGDLKFHIYHMGQAGFPEARAVFYAAEICCGLEDLHRERIVYRDLKPENILLDDHGHIRISDLGLAVHVPEGQTIKGRVGTVGYMAPEVVKNERYTFSPDWWALGCLLYEMIAGQSPFQQRKKKIKREEVERLVKEVPEEYSERFSPQARSLCSQLLCKDPAERLGCRGGSAREVKEHPLFKKLNFKRLGAGMLEPPFKPDPQAIYCKDVLDIEQFSTVKGVELEPTDQDFYQKFATGSVPIPWQNEMVETECFQELNVFGLDGSVPPDLDWKGQPPAPPKKGLLQRLFSRQDCCGNCSDSEEELPTRL

SEQ ID NO: 4683 - protein, 1268 aa, Homo Sapiens
MSSVAVLTQESFAEHRSGLVPQQIKVATLNSEEESDPPTYKDAFPPLPEKAACLESAQEPAGAWGNKIRPIKASVITQVFHVPLEERKYKDMNQFGEGEQAKICLEIMQRTGAHLELSLAKDQGLSIMVSGKLDAVMKARKDIVARLQTQASATVAIPKEHHRFVIGKNGEKLQDLELKTATKIQIPRPDDPSNQIKITGTKEGIEKARHEVLLISAEQDKRAVERLEVEKAFHPFIAGPYNRLVGEIMQETGTRINIPPPSVNRTEIVFTGEKEQLAQAVARIKKIYEEKKKKTTTIAVEVKKSQHKYVIGPKGNSLQEILERTGVSVEIPPSDSISETVILRGEPEKLGQALTEVYAKANSFTVSSVAAPSWLHRFIIGKKGQNLAKITQQMPKVHIEFTEGEDKITLEGPTEDVNVAQEQIEGMVKDLINRMDYVEINIDHKFHRHLIGKSGANINRIKDQYKVSVRIPPDSEKSNLIRIEGDPQGVQQAKRELLELASRMENERTKDLIIEQRFHRTIIGQKGERIREIRDKFPEVIINFPDPAQKSDIVQLRGPKNEVEKCTKYMQKMVADLVENSYSISVPIFKQFHKNIIGKGGANIKKIREESNTKIDLPAENSNSETIIITGKRANCEAARSRILSIQKDLANIAEVEVSIPAKLHNSLIGTKGRLIRSIMEECGGVHIHFPVEGSGSDTVVIRGPSSDVEKAKKQLLHLAEEKQTKSFTVDIRAKPEYHKFLIGKGGGKIRKVRDSTGARVIFPAAEDKDQDLITIIGKEDAVREAQKELEALIQNLDNVVEDSMLVDPKHHRHFVIRRGQVLREIAEEYGGVMVSFPRSGTQSDKVTLKGAKDCVEAAKKRIQEIIEDLEAQVTLECAIPQKFHRSVMGPKGSRIQQITRDFSVQIKFPDREENAVHSTEPVVQENGDEAGEGREAKDCDPGSPRRCDIIIISGRKEKCEAAKEALEALVPVTIEVEVPFDLHRYVIGQKGSGIRKMMDEFEVNIHVPAPELQSDIIAITGLAANLDRAKAGLLERVKELQAEQEDRALRSFKLSVTVDPKYHPKIIGRKGAVITQIRLEHDVNIQFPDKDDGNQPQDQITITGYEKNTEAARDAILRIVGELEQMVSEDVPLDHRVHARIIGARGKAIRKIMDEFKVDIRFPQSGAPDPNCVTVTGLPENVEEAIDHILNLEEEYLADVVDSEALQVYMKPPAHEEAKAPSRGFVVRDAPWTASSSEKAPDMSSSEEFPSFGAQVAPKTLPWGPKR

SEQ ID NO: 4684 - protein, 112 aa, Homo Sapiens
TCYVQGASPCQSYYVQAPASGSTSQYCVTDPCSAPCSTSYCCLAPRTFGVSPLRRWIQRPQNCNTGSSGCCENSGSSGCCGSGGCGCSCGCGSSGCCCLGIIPMKSRSPALL

SEQ ID NO: 4685 - protein, 261 aa, Homo Sapiens
MGHEQNQGAALLQMLPLLWLLPHSWAVPEAPTPMWPDDLQNHTFLHTVYCQDGSPSVGLSEAYDEDQLFFFDFSQNTRVPRLPEFADWAQEQGDAPAILFDKEFCEWMIQQIGPKLDGKIPVSRGFPIAEVFTLKPLEFGKPNTLVCFVSNLFPPMLTVNWQHHSVPVEGFGPTFVSAVDGLSFQAFSYLNFTPEPSDIFSCIVTHEIDRYTAIAYWVPRNALPSDLLENVLCGVAFGLGVLGIIVGIVLIIYFRKPCSGD

SEQ ID NO: 4686 - protein, 291 aa, Homo Sapiens
MEAPASAQTPHPHEPISFGIDQILNSPDQDSAPAPRGPDGASYLGGPPGGRPGATYPSLPASFAGPGAPFEDAGSYSVNLSLAPAGVIRVPAHRPLPGAVPPPLPSALPAMPSVPTVSSLGRLNFPWMESSRRFVKDRFTAAAALTPFTVTRRIGHPYQNRTPPKRKKPRTSFSRVQICELEKRFHRQKYLASAERAALAKSLKMTDAQVKTWFQNRRTKWRRQTAEEREADGQQASRLMLQLQHDAFQKSLNDSIQPDPLCLHNSSLFALQNLQPWEEDSSKVPAVTSLV

SEQ ID NO: 4687 - protein, 402 aa, Homo Sapiens
MKLEVFVPRAAHGDKQGSDLEGAGGSDAPSPLSAAGDDSLGSDGDCAAKPSAGGGARDTQGDGEQSAGGGPGAEEAIPAAAAAAVVAEGAEAGAAGPGAGGAGSGEGARSKPYTRRPKPPYSYIALIAMAIRDSAGGRLTLAEINEYLMGKFPFFRGSYTGWRNSVRHNLSLNDCFVKVLRDPSRPWGKDNYWMLNPNSEYTFADGVFRRRRKRLSHRAPVPAPGLRPEEAPGLPAAPPPAPAAPASPRMRSPARQEERASPAGKFSSSFAIDSILRKPFRSRRLRDTAPGTTLQWGAAPCPPLPAFPALLPAAPCRALLPLCAYGAGEPARLGAREAEVPPTAPPLLLAPLPAAAPAKPLRGPAAGGAHLYCPLRLPAALQAALVRRPGPHLSYPVETLLA

SEQ ID NO: 4688 - protein, 44 aa, Homo Sapiens [sequence omitted]

SEQ ID NO: 4689 - protein, 38 aa, Homo Sapiens
HLPTIRCLGNGRWAIPKITCMNRKWSFRKNGLPCYNNY

SEQ ID NO: 4690 - protein, 1114 aa, Homo Sapiens
MAKATSGAAGLRLLLLLLLPLLGKVALGLYFSRDAYWEKLYVDQAAGTPLLYVHALRDAPEEVPSFRLGQHLYGTYRTRLHENNWICIQEDTGLLYLNRSLDHSSWEKLSVRNRGFPLLTVYLKVFLSPTSLREGECQWPGCARVYFSFFNTSFPACSSLKPRELCFPETRPSFRIRENRPPGTFHQFRLLPVQFLCPNISVAYRLLEGEGLPFRCAPDSLEVSTRWALDREQREKYELVAVCTVHAGAREEVVMVPFPVTVYDEDDSAPTFPAGVDTASAVVEFKRKEDTVVATLRVFDADVVPASGELVRRYTSTLLPGDTWAQQTFRVEHWPNETSVQANGSFVRATVHDYRLVLNRNLSISENRTMQLAVLVNDSDFQGPGAGVLLLHFNVSVLPVSLHLPSTYSLSVSRRARRFAQIGKVCVENCQAFSGINVQYKLHSSGANCSTLGVVTSAEDTSGILFVNDTKALRRPKCAELHYMVVATDQQTSRQAQAQLLVTVEGSYVAEEAGCPLSCAVSKRRLECEECGGLGSPTGRCEWRQGDGKGITRNFSTCSPSTKTCPDGHCDVVETQDINICPQDCLRGSIVGGHEPGEPRGIKAGYGTCNCFPEEEKCFCEPEDIQDPLCDELCRTVIAAAVLFSFIVSVLLSAFCIHCYHKFAHKPPISSAEMTFRRPAQAFPVSYSSSGARRPSLDSMENQVSVDAFKILEDPKWEFPRKNLVLGKTLGEGEFGKVVKATAFHLKGRAGYTTVAVKMLKENASPSELRDLLSEFNVLKQVNHPHVIKLYGACSQDGPLLLIVEYAKYGSLRGFLRESRKVGPGYLGSGGSRNSSSLDHPDERALTMGDLISFAWQISQGMQYLAEMKLVHRDLAARNILVAEGRKMKISDFGLSRDVYEEDSYVKRSQGRIPVKWMAIESLFDHIYTTQSDVWSFGVLLWEIVTLGGNPYPGIPPERLFNLLKTGHRMERPDNCSEEMYRLMLQCWKQEPDKRPVFADISKDLEKMMVKRRDYLDLAASTPSDSLIYDDGLSEEETPLVDCNNAPLPRALPSTWIENKLYGMSDPNWPGESPVPLTRADGTNTGFPRYPNDSVYANWMLSPSAAKLMDTFDS

SEQ ID NO: 4691 - protein, 482 aa, Homo Sapiens
MNGTLDHPDQPDLDAIKMFVGQVPRTWSEKDLRELFEQYGAVYEINVLRDRSQNPPQSKGCCFVTFYTRKAALEAQNALHNMKVLPGMHHPIQMKPADSEKNNAVEDRKLFIGMISKKCTENDIRVMFSSFGQIEECRILRGPDGLSRGCAFVTFTTRAMAQTAIKAMHQAQTMEGCSSPMVVKFADTQKDKEQKRMAQQLQQQMQQISAASVWGNLAGLNTLGPQYLALLQQTASSGNLNTLSSLHPMGGLNAMQLQNLAALAAAASAAQNTPSGTNALTTSSSPLSVLTSSGSSPSSSSSNSVNPIASLGALQTLAGATAGLNVGSLAGMAALNGGLGSSGLSNGTGSTMEALTQAYSGIQQYAAAALPTLYNQNLLTQQSIGAAGSQKEGPEGANLFIYHLPQEFGDQDLLQMFMPFGNVVSAKVFIDKQTNLSKCFGFVSYDNPVSAQAAIQSMNGFQIGMKRLKVQLKRSKNDSKPY

SEQ ID NO: 4692 - protein, 423 aa, Homo Sapiens
MAKLTESMTNVLEGDSMDQDVESPVAIHQPKLPKQARDDLPRHISRDRTKRKIQRYVRKDGKCNVHHGNVRETYRYLTDIFTTLVDLKWRFNLLIFVMVYTVTWLFFGMIWWLIAYIRGDMDHIEDPSWTPCVTNLNGFVSAFLFSIETETTIGYGYRVITDKCPEGIILLLIQSVLGSIVNAFMVGCMFVKISQPKKRAETLVFSTHAVISMRDGKLCLMFRVGDLRNSHIVEASIRAKLIKSKQTSEGEFIPLNQTDINVGYYTGDDRLFLVSPLIISHEINQQSPFWEISKAQLPKEELEIVVILEGMVEATGMTCQARSSYITSEILWGYRFTPVLTLEDGFYEVDYNSFHETYETSTPSLSAKELAELASRAELPLSWSVSSKLNQHAELETEEEEKNLEEQTERNGDVANLENESKV

SEQ ID NO: 4693 - protein, 2214 aa, Homo Sapiens
MATRSSRRESRLPFLFTLVALLPPGALCEVWTQRLHGGSAPLPQDRGFLVVQGDPRELRLWARGDARGASRADEKPLRRKRSAALQPEPIKVYGQVSLNDSHNQMVVHWAGEKSNVIVALARDSLALARPKSSDVYVSYDYGKSFKKISDKLNFGLGNRSEAVIAQFYHSPADNKRYIFADAYAQYLWITFDFCNTLQGFSIPFRAADLLLHSKASNLLLGFDRSHPNKQLWKSDDFGQTWIMIQEHVKSFSWGIDPYDKPNTIYIERHEPSGYSTVFRSTDFFQSRENQEVILEEVRDFQLRDKYMFATKVVHLLGSEQQSSVQLWVSFGRKPMRAAQFVTRHPINEYYIADASEDQVFVCVSHSNNRTNLYISEAEGLKFSLSLENVLYYSPGGAGSDTLVRYFANEPFADFHRVEGLQGVYIATLINGSMNEENMRSVITFDKGGTWEFLQAPAFTGYGEKINCELSQGCSLHLAQRLSQLLNLQLRRMPILSKESAPGLIIATGSVGKNLASKTNVYISSSAGARWREALPGPHYYTWGDHGGIITAIAQGMETNELKYSTNEGETWKTFIFSEKPVFVYGLLTEPGEKSTVFTIFGSNKENVHSWLILQVNATDALGVPCTENDYKLWSPSDERGNECLLGHKTVFKRRTPHATCFNGEDFDRPVVVSNCSCTREDYECDFGFKMSEDLSLEVCVPDPEFSGKSYSPPVPCPVGSTYRRTRGYRKISGDTCSGGDVEARLEGELVPCPLAEENEFILYAVRKSIYRYDLASGATEQLPLTGLRAAVALDFDYEHNCLYWSDLALDVIQRLCLNGSTGQEVIINSGLETVEALAFEPLSQLLYWVDAGFKKIEVANPDGDFRLTIVNSSVLDRPRALVLVPQEGVMFWTDWGDLKPGIYRSNMDGSAAYHLVSEDVKWPNGISVDDQWIYWTDAYLECIERITFSGQQRSVILDNLPHPYAIAVFKNEIYWDDWSQLSIFRASKYSGSQMEILANQLTGLMDMKIFYKGKNTGSNACVPRPCSLLCLPKANNSRSCRCPEDVSSSVLPSGDLMCDCPQGYQLKNNTCVKEENTCLRNQYRCSNGNCINSIWWCDFDNDCGDMSDERNCPTTICDLDTQFRCQESGTCIPLSYKCDLEDDCGDNSDESHCEMHQCRSDEYNCSSGMCIRSSWVCDGDNDCRDWSDEANCTAIYHTCEASNFQCRNGHCIPQRWACDGDTDCQDGSDEDPVNCEKKCNGFRCPNGTCIPSSKHCDGLRDCSDGSDEQHCEPLCTHFMDFVCKNRQQCLFHSMVCDGIIQCRDGSDEDAAFAGCSQDPEFHKVCDEFGFQCQNGVCISLIWKCDGMDDCGDYSDEANCENPTEAPNCSRYFQFRCENGHCIPNRWKCDRENDCGDWSDEKDCGDSHILPFSTPGPSTCLPNYYRCSSGTCVMDTWVCDGYRDCADGSDEEACPLLANVTAASTPTQLGRCDRFEFECHQPKTCIPNWKRCDGHQDCQDGRDEANCPTHSTLTCMSREFQCEDGEACIVLSERCDGFLDCSDESDEKACSDELTVYKVQNLQWTADFSGDVTLTWMRPKKMPSASCVYNVYYRVVGESIWKTLETHSNKTNTVLKVLKPDTTYQVKVQVQCLSKAHNTNDFVTLRTPEGLPDAPRNLQLSLPREAEGVIVGHWAPPIHTHGLIREYIVEYSRSGSKMWASQRAASNFTEIKNLLVNTLYTVRVAAVTSRGIGNWSDSKSITTIKGKVIPPPDIHIDSYGENYLSFTLTMESDIKVNGYVVNLFWAFDTHKQERRTLNFRGSILSHKVGNLTAHTSYEISAWAKTDLGDSPLAFEHVMTRGVRPPAPSLKAKAINQTAVECTWTGPRNVVYGIFYATSFLDLYRNPKSLTTSLHNKTVIVSKDEQYLFLVRVVVPYQGPSSDYVVVKMIPDSRLPPRHLHVVHTGKTSVVIKWESPYDSPDQDLLYAIAVKDLIRKTDRSYKVKSRNSTVEYTLNKLEPGGKYHIIVQLGNMSKDSSIKITTVSLSAPDALKIITENDHVLLFWKSLALKEKHFNESRGYEIHMFDSAMNITAYLGNTTDNFFKISNLKMGHNYTFTVQARCLFGNQICGEPAILLYDELGSGADASATQAARSTDVAAVVVPILFLILLSLGVGFAILYTKHRRLQSSFTAFANSHYSSRLGSAIFSSGDDLGEDDEDAPMITGFSDDVPMVIA

SEQ ID NO: 4694 - protein, 128 aa, Homo Sapiens
MGIQGGSVLFGLLLVLAVFCHSGHSLQCYNCPNPTADCKTAVNCSSDFDACLITKAGLQVYNKCWKFEHCNFNDVTTRLRENELTYYCCKKDLCNFNEQLENGGTSLSEKTVLLLVTPFLAAAWSLHP

SEQ ID NO: 4695 - protein, 402 aa, Homo Sapiens
MMVHCAGCERPILDRFLLNVLDRAWHIKCVQCCECKTNLSEKCFSREGKLYCKNDFFRRFGTKCAGCAQGISPSDLVRKARSKVFHLNCFTCMVCNKQLSTGEELYVIDENKFVCKDDYLSSSSLKEGSLNSVSSCTDRSLSPDLQDALQDDPKETDNSTSSDKETANNENEEQNSGTKRRGPRTTIKAKQLETLKAAFAATPKPTRHIREQLAQETGLNMRVIQVWFQNRRSKERRMKQLSALGARRHAFFRSPRRMRPLGGRLDESEMLGSTPYTYYGDYQGDYYAPGSNYDFFAHGPPSQAQSPADSSFLAASGPGSTPLGALEPPLAGPHAADNPRFTDMISHPDTPSPEPGLPGTLHPMPGEVFSGGPSPPFPMSGTSGYSGPLSHPNPELNEAAVW

SEQ ID NO: 4696 - protein, 265 aa, Homo Sapiens
MKKEVCSVAFLKAVFAEFLATLIFVFFGLGSALKWPSALPTILQIALAFGLAIGTLAQALGPVSGGHINPAITLALLVGNQISLLRAFFYVAAQLVGAIAGAGILYGVAPLNARGNLAVNALNNNTTQGQAMVVELILTFQLALCIFASTDSRRTSPVGSPALSIGLSVTLGHLVGIYFTGCSMNPARSFGPAVVMNRFSPAHWVFWVGPIVGAVLAAILYFYLLFPNSLSLSERVAIIKGTYEPDEDWEEQREERKKTMELTTR

SEQ ID NO: 4697 - protein, 472 aa, Homo Sapiens
MLGTVKMEGHETSDWNSYYADTQEAYSSVPVSNMNSGLGSMNSMNTYMTMNTMTTSGNMTPASFNMSYANPGLGAGLSPGAVAGMPGGSAGAMNSMTAAGVTAMGTALSPSGMGAMGAQQAASMNGLGPYAAAMNPCMSPMAYAPSNLGRSRAGGGGDAKTFKRSYPHAKPPYSYISLITMAIQQAPSKMLTLSEIYQWIMDLFPYYRQNQQRWQNSIRHSLSFNDCFVKVARSPDKPGKGSYWTLHPDSGNMFENGCYLRRQKRFKCEKQPGAGGGGGSGSGGSGAKGGPESRKDPSGASNPSADSPLHRGVHGKTGQLEGAPAPGPAASPQTLDHSGATATGGASELKTPASSTAPPISSGPGALASVPASHPAHGLAPHESQLHLKGDPHYSFNHPFSINNLMSSSEQQHKLDFKAYEQALQYSPYGSTLPASLPLGSASVTTRSPIEPSALEPAYYQGVYSRPVLNTS

SEQ ID NO: 4698 - protein, 467 aa, Homo Sapiens
MATQTCTPTFSTGSIKGLCGTAGGISRVSSIRSVGSCRVPSLAGAAGYISSARSGLSGLGSCLPGSYLSSECHTSGFVGSGGWFCEGSFNGSEKETMQFLNDRLANYLEKVRQLERENAELESRIQEWYEFQIPYICPDYQSYFKTIEDFQQKILLTKSENARLVLQIDNAKLAADDFRTKYETELSLRQLVEADINGLRRILDELTLCKADLEAQVESLKEELMCLKKNHEEEVSVLRCQLGDRLNVEVDAAPPVDLNKILEDMRCQYEALVENNRRDVEAWFNTQTEELNQQVVSSSEQLQCCQTEIIELRRTVNALEIELQAQHSMRNSLESTLAETEARYSSQLAQMQCLISNVEAQLSEIRCDLERQNQEYQVLLDVKARLEGEIATYRHLLEGEDCKLPPQPCATACKPVIRVPSVPPVPCVPSVPCTPAPQVGTQIRTITEEIRDGKVISSREHVQSRPL

SEQ ID NO: 4699 - protein, 214 aa, Homo Sapiens
MELAAGSFSEEQFWEACAELQQPALAGADWQLLVETSGISIYRLLDKKTGLHEYKVFGVLEDCSPTLLADIYMDSDYRKQWDQYVKELYEQECNGETVVYWEVKYPFPMSNRDYVYLRQRRDLDMEGRKIHVILARSTSMPQLGERSGVIRVKQYKQSLAIESDGKKGSKVFMYYFDNPGGQIPSWLINWAAKNGVPNFLKDMARACQNYLKKT

SEQ ID NO: 4700 - protein, 305 aa, Homo Sapiens
MGTEKESPEPDCQKQFQAAVSVIQNLPKNGSYRPSYEEMLRFYSYYKQATMGPCLVPRPGFWDPIGRYKWDAWNSLGKMSREEAMSAYITEMKLVAQKVIDTVPLGEVAEDMFGYFEPLYQVIPDMPRPPETFLRRVTGWKEQVVNGDVGAVSEPPCLPKEPAPPSPESHSPRDLDSEVFCDSLEQLEPELVWTEQRAASGGKRDPRNSPVPPTKKEGLRGSPPGPQELDVWLLGTVRALQESMQEVQARVQSLESMPRPPEQRPQPRPSARPWPLGLPGPALLFFLLWPFVVQWLFRMFRTQKR

SEQ ID NO: 4701 - protein, 2377 aa, Homo Sapiens
MDEEEDGAGAEESGQPRSFMRLNDLSGAGGRPGPGSAEKDPGSADSEAEGLPYPALAPVVFFYLSQDSRPRSWCLRTVCNPWFERISMLVILLNCVTLGMFRPCEDIACDSQRCRILQAFDDFIFAFFAVEMVVKMVALGIFGKKCYLGDTWNRLDFFIVIAGMLEYSLDLQNVSFSAVRTVRVLRPLRAINRVPSMRILVTLLLDTLPMLGNVLLLCFFVFFIFGIVGVQLWAGLLRNRCFLPENFSLPLSVDLERYYQTENEDESPFICSQPRENGMRSCRSVPTLRGDGGGGPPCGLDYEAYNSSSNTTCVNWNQYYTNCSAGEHNPFKGAINFDNIGYAWIAIFQVITLEGWVDIMYFVMDAHSFYNFIYFILLIIVGSFFMINLCLVVIATQFSETKQRESQLMREQRVRFLSNASTLASFSEPGSCYEELLKYLVYILRKAARRLAQVSRAAGVRVGLLSSPAPLGGQETQPSSSCSRSHRRLSVHHLVHHHHHHHHHYHLGNGTLRAPRASPEIQDRDANGSRRLMLPPPSTPALSGAPPGGAESVHSFYHADCHLEPVRCQAPPPRSPSEASGRTVGSGKVYPTVHTSPPPETLKEKALVEVAASSGPPTLTSLNIPPGPYSSMHKLLETQSTGACQSSCKISSPCLKADSGACGPDSCPYCARAGAGEVELADREMPDSDSEAVYEFTQDAQHSDLRDPHSRRQRSLGPDAEPSSVLAFWRLICDTFRKIVDSKYFGRGIMIAILVNTLSMGIEYHEQPEELTNALEISNIVFTSLFALEMLLKLLVYGPFGYIKNPYNIFDGVIVVISVWEIVGQQGGGLSVLRTFRLMRVLKLVRFLPALQRQLVVLMKTMDNVATFCMLLMLFIFIFSILGMHLFGCKFASERDGDTLPDRKNFDSLLWAIVTVFQILTQEDWNKVLYNGMASTSSWAALYFIALMTFGNYVLFNLLVAILVEGFQAEEISKREDASGQLSCIQLPVDSQGGDANKSESEPDFFSPSLDGDGDRKKCLALVSLGEHPELRKSLLPPLIIHTAATPMSLPKSTSTGLGEALGPASRRTSSSGSAEPGAAHEMKSPPSARSSPHSPWSAASSWTSRRSSRNSLGRAPSLKRRSPSGERRSLLSGEGQESQDEEESSEEERASPAGSDHRHRGSLEREAKSSFDLPDTLQVPGLHRTASGRGSASEHQDCNGKSASGRLARALRPDDPPLDGDDADDEGNLSKGERVRAWIRARLPACCLERDSWSAYIFPPQSRFRLLCHRIITHKMFDHVVLVIIFLNCITIAMERPKIDPHSAERIFLTLSNYIFTAVFLAEMTVKVVALGWCFGEQAYLRSSWNVLDGLLVLISVIDILVSMVSDSGTKILGMLRVLRLLRTLRPLRVISRAQGLKLVVETLMSSLKPIGNIVVICCAFFIIFGILGVQLFKGKFFVCQGEDTRNITNKSDCAEASYRWVRHKYNFDNLGQALMSLFVLASKDGWVDIMYDGLDAVGVDQQPIMNHNPWMLLYFISFLLIVAFFVLNMFVGVVVENFHKCRQHQEEEEARRREEKRLRRLEKKRRNLMLDDVIASGSSASAASEAQCKPYYSDYSRFRLLVHHLCTSHYLDLFITGVIGLNVVTMAMEHYQQPQILDEALKICNYIFTVIFVLESVFKLVAFGFRRFFQDRWNQLDLAIVLLSIMGITLEEIEVNASLPINPTIIRIMRVLRIARVLKLLKMAVGMRALLDTVMQALPQVGNLGLLFMLLFFIFAALGVELFGDLECDETHPCEGLGRHATFRNFGMAFLTLFRVSTGDNWNGIMKDTLRDCDQESTCYNTVISPIYFVSFVLTAQFVLVNVVIAVLMKHLEESNKEAKEEAELEAELELEMKTLSPQPHSPLGSPFLWPGVEGPDSPDSPKPGALHPAAHARSASHFSLEHPTDRQLFDTISLLIQGSLEWELKLMDELAGPGGQPSAFPSAPSLGGSDPQIPLAEMEALSLTSEIVSEPSCSLALTDDSLPDDMHTLLLSALESNMQPHPTELPGPDLLTVRKSGVSRTHSLPNDSYMCRHGSTAEGPLGHRGWGLPKAQSGSVLSVHSQPADTSYILQLPKDAPHLLQPHSAPTWGTIPKLPPPGRSPLAQRPLRRQAAIRTDSLDVQGLGSREDLLAEVSGPSPPLARAYSFWGQSSTQAQQHSRSHSKISKHMTPPAPCPGPEPNWGKGPPETRSSLELDTELSWISGDLLPPGGQEEPPSPRDLKKCYSVEAQSCQRRPTSWLDEQRRHSIAVSCLDSGSQPHLGTDPSNLGGQPLGGPGSRPKKKLSPPSITIDPPESQGPRTPPSPGICLRRRAPSSDSKDPLASGPPDSMAASPSPKKDVLSLSGLSSDPADLDP

SEQ ID NO: 4702 - protein, 390 aa, Homo Sapiens
MPDTNSTINLSLSTRVTLAFFMSLVAFAIMLGNALVILAFVVDKNLRHRSSYFFLNLAISDFFVGVISIPLYIPHTLFEWDFGKEICVFWLTTDYLLCTASVYNIVLISYDRYLSVSNAVSYRTQHTGVLKIVTLMVAVWVLAFLVNGPMILVSESWKDEGSECEPGFFSEWYILAITSFLEFVIPVILVAYFNMNIYWSLWKRDHLSRCQSHPGLTAVSSNICGHSFRGRLSSRRSLSASTEVPASFHSERQRRKSSLMFSSRTKMNSNTIASKMGSFSQSDSVALHQREHVELLRARRLAKSLAILLGVFAVCWAPYSLFTIVLSFYSSATGPKSVWYRIAFWLQWFNSFVNPLLYPLCHKRFQKAFLKIFCIKKQPLPSQHSRSVSS

SEQ ID NO: 4703 - protein, 268 aa, Homo Sapiens
MEMKKKINLELRNRSPEEVTELVLDNCLCVNGEIEGLNDTFKELEFLSMANVELSSLARLPSLNKLRKLELSDNIISGGLEVLAEKCPNLTYLNLSGNKIKDLSTVEALQNLKNLKSLDLFNCEITNLEDYRESIFELLQQITYLDGFDQEDNEAPDSEEEDDEDGDEDDEEEEENEAGPPEGYEEEEEEEEEEDEDEDEDEDEAGSELGEGEEEVGLSYLMKEEIQDEEDDDDYVEEGEEEEEEEEGGLRGEKRKRDAEDDGEEEDD

SEQ ID NO: 4704 - protein, 90 aa, Homo Sapiens
MACPLDQAIGLLVAIFHKYSGREGDKHTLSKKELKELIQKELTIGSKLQDAEIARLMEDLDRNKDQEVNFQEYVTFLGALALIYNEALKG

SEQ ID NO: 4705 - protein, 686 aa, Homo Sapiens
MRLLTLLGLLCGSVATPLGPKWPEPVFGRLASPGFPGEYANDQERRWTLTAPPGYRLRLYFTHFDLELSHLCEYDFVKLSSGAKVLATLCGQESTDTERAPGKDTFYSLGSSLDITFRSDYSNEKPFTGFEAFYAAEDIDECQVAPGEAPTCDHHCHNHLGGFYCSCRAGYVLHRNKRTCSALCSGQVFTQRSGELSSPEYPRPYPKLSSCTYSISLEEGFSVILDFVESFDVETHPETLCPYDFLKIQTDREEHGPFCGKTLPHRIETKSNTVTITFVTDESGDHTGWKIHYTSTAQPCPYPMAPPNGHVSPVQAKYILKDSFSIFCETGYELLQGHLPLKSFTAVCQKDGSWDRPMPACSIVDCGPPDDLPSGRVEYITGPGVTTYKAVIQYSCEETFYTMKVNDGKYVCEADGFWTSSKGEKSLPVCEPVCGLSARTTGGRIYGGQKAKPGDFPWQVLILGGTTAAGALLYDNWVLTAAHAVYEQKHDASALDIRMGTLKRLSPHYTQAWSEAVFIHEGYTHDAGFDNDIALIKLNNKVVINSNITPICLPRKEAESFMRTDDIGTASGWGLTQRGFLARNLMYVDIPIVDHQKCTAAYEKPPYPRGSVTANMLCAGLESGGKDSCRGDSGGALVFLDSETERWFVGGIVSWGSMNCGEAGQYGVYTKVINYIPWIENIISDF

SEQ ID NO: 4706 - protein, 860 aa, Homo Sapiens
MEIGSAGPAGAQPLLMVPRRPGYGTMGKPIKLLANCFQVEIPKIDVYLYEVDIKPDKCPRRVNREVVDSMVQHFKVTIFGDRRPVYDGKRSLYTANPLPVATTGVDLDVTLPGEGGKDRPFKVSIKFVSRVSWHLLHEVLTGRTLPEPLELDKPISTNPVHAVDVVLRHLPSMKYTPVGRSFFSAPEGYDHPLGGGREVWFGFHQSVRPAMWKMMLNIDVSATAFYKAQPVIQFMCEVLDIHNIDEQPRPLTDSHRVKFTKEIKGLKVEVTHCGTMRRKYRVCNVTRRPASHQTFPLQLENGQTVERTVAQYFREKYTLQLKYPHLPCLQVGQEQKHTYLPLEVCNIVAGQRCIKKLTDNQTSTMIKATARSAPDRQEEISRLVRSANYETDPFVQEFQFKVRDEMAHVTGRVLPAPMLQYGGRNRTVATPSHGVWDMRGKQFHTGVEIKMWAIACFATQRQCREEILKGFTDQLRKISKDAGMPIQGQPCFCKYAQGADSVEPMFRHLKNTYSGLQLIIVILPGKTPVYAEVKRVGDTLLGMATQCVQVKNVIKTSPQTLSNLCLKINVKLGGINNILVPHQRPSVFQQPVIFLGADVTHPPAGDGKKPSIAAVVGSMDAHPSRYCATVRVQRPRQEIIQDLASMVRELLIQFYKSTRFKPTRIIFYRDGVSEGQFRQVLYYELLAIREACISLEKDYQPGITYIVVQKRHHTRLFCADRTERVGRSGNIPAGTTVDTDITHPYEFDFYLCSHAGIQGTSRPSHYHVLWDDNCFTADELQLLTYQLCHTYVRCTRSVSIPAPAYYAHLVAFRARYHLVDKEHDSAEGSHVSGQSNGRDPQALAKAVQIHQDTLRTMYFA

SEQ ID NO: 4707 - protein, 770 aa, Homo Sapiens
MRGVWPPPVSALLSALGMSTYKRATLDEEDLVDSLSEGDAYPNGLQVNFHSPRSGQRCWAARTQVEKRLVVLVVLLAAGLVACLAALGIQYQTRSPSVCLSEACVSVTSSILSSMDPTVDPCHDFFSYACGGWIKANPVPDGHSRWGTFSNLWEHNQAIIKHLLENSTASVSEAERKAQVYYRACMNETRIEELRAKPLMELIERLGGWNITGPWAKDNFQDTLQVVTAHYRTSPFFSVYVSADSKNSNSNVIQVDQSGLGLPSRDYYLNKTENEKVLTGYLNYMVQLGKLLGGGDEEAIRPQMQQILDFETALANITIPQEKRRDEELIYHKVTAAELQTLAPAINWLPFLNTIFYPVEINESEPIVVYDKEYLEQISTLINTTDRCLLNNYMIWNLVRKTSSFLDQRFQDADEKFMEVMYGTKKTCLPRWKFCVSDTENNLGFALGPMFVKATFAEDSKSIATEIILEIKKAFEESLSTLKWMDEETRKSAKEKADAIYNMIGYPNFIMDPKELDKVFNDYTAVPDLYFENAMRFFNFSWRVTADQLRKAPNRDQWSMTPPMVNAYYSPTKNEIVFPAGILQAPFYTRSSPKALNFGGIGVVVGHELTHAFDDQGREYDKDGNLRPWWKNSSVEAFKRQTECMVEQYSNYSVNGEPVNGRHTLGENIADNGGLKAAYRAYQNWVKKNGAEHSLPTLGLTNNQLFFLGFAQVWCSVRTPESSHEGLITDPHSPSRFRVIGSLSNSKEFSEHFRCPPGSPMNPPHKCEVW

SEQ ID NO: 4708 - protein, 272 aa, Homo Sapiens
MSDQQLDCALDLMRRLPPQQIEKNLSDLIDLVPSLCEDLLSSVDQPLKIARDKVVGKDYLLCDYNRDGDSYRSPWSNKYDPPLEDGAMPSARLRKLEVEANNAFDQYRDLYFEGGVSSVYLWDLDHGFAGVILIKKAGDGSKKIKGCWDSIHVVEVQEKSSGRTAHYKLTSTVMLWLQTNKSGSGTMNLGGSLTRQMEKDETVSDCSPHIANIGRLVEDMENKIRSTLNEIYFGKTKDIVNGLRSVQTFADKSKQEALKNDLVEALKRKQQC

SEQ ID NO: 4709 - protein, 329 aa, Homo Sapiens
MTHFNKGPSYGLSAEVKNKIASKYDHQAEEDLRNWIEEVTGMSIGPNFQLGLKDGIILCELINKLQPGSVKKVNESSLNWPQLENIGNFIKAIQAYGMKPHDIFEANDLFENGNMTQVQTTLVALAGLAKTKGFHTTIDIGVKYAEKQTRRFDEGKLKAGQSVIGLQMGTNKCASQAGMTAYGTRRHLYDPKMQTDKPFDQTTISLQMGTNKGASQAGMLAPGTRRDIYDQKLTLQPVDNSTISLQMGTNKVASQKGMSVYGLGRQVYDPKYCAAPTEPVIHNGSQGTGTNGSEISDSDYQAEYPDEYHGEYQDDYPRDYQYSDQGIDY

SEQ ID NO: 4710 - protein, 718 aa, Homo Sapiens
MRAVLDTADIAIVALYFILVMCIGFFAMWKCNRSTVSGYFLAGRSMTWVTIGASLFVSNIGSEHFIGLAGSGAASGFAVGAWEFNALLLLQLLGWVFIPIYIRSGVYTMPEYLSKRFGGHRIQVYFAALSLILYIFTKLSVDLYSGALFIQESLGWNLYVSVILLIGMTALLTVTGGLVAVIYTDTLQALLMIIGALTLMIISIMEIGGFEEVKRRYMLASPDVTSILLTYNLSNTNSCNVSPKKEALKMLRNPTDEDVPWPGFILGQTPASVWYWCADQVIVQRVLAAKNIAHAKGSTLMAGFLKLLPMFIIVVPGMISRILFTDDIACINPEHCMLVCGSRAGCSNIAYPRLVMKLVPVGLRGLMMAVMIAALMSDLDSIFNSASTIFTLDVYKLIRKSASSRELMIVGRIFVAFMVVISIAWVPIIVEMQGGQMYLYIQEVADYLTPPVAALFLLAIFWKRCNEQGAFYGGMAGFVLGAVRLILAFAYRAPECDQPDNRPGFIKDIHYMYVATGLFWVTGLITVIVSLLTPPPTKEQIRTTTFWSKKNLVVKENCSPKEEPYQMQEKSILRCSENNETINHIIPNGKSEDSIKGLQPEDVNLLVTCREEGNPVASLGHSEAETPVDAYSNGQAALMGEKERKKETDDGGRYWKFIDWFCGFKSKSLSKRSLRDLMEEEAVCLQMLEETRQVKVILNIGLFAVCSLGIFMFVYFSL

SEQ ID NO: 4711 - protein, 279 aa, Homo Sapiens
MTERFDCHHCNESLFGKKYILREESPYCVVCFETLFANTCEECGKPIGCDCKDLSYKDRHWHEACFHCSQCRNSLVDKPFAAKEDQLLCTDCYSNEYSSKCQECKKTIMPGTRKMEYKGSSWHETCFICHRCQQPIGTKSFIPKDNQNFCVPCYEKQHAMQCVQCKKPITTGGVTYREQPWHKECFVCTACRKQLSGQRFTARDDFAYCLNCFCDLYAKKCAGCTNPISGLGGTKYISFEERQWHNDCFNCKKCSLSLVGRGFLTERDDILCPDCGKDI

SEQ ID NO: 4712 - protein, 391 aa, Homo Sapiens
MDQCVTVERELEKVLHKFSGYGQLCERGLEELIDYTGGLKHEILQSHGQDAELSGTLSLVLTQCCKRIKDTVQKLASDHKDIHSSVSRVGKAIDKNFDSDISSVGIDGCWQADSQRLLNEVMVEHFFRQGMLDVAEELCQESGLSVDPSQKEPFVELNRILEALKVRVLRPALEWAVSNREMLIAQNSSLEFKLHRLYFISLLMGGTTNQREALQYAKNFQPFALNHQKDIQVLMGSLVYLRQGIENSPYVHLLDANQWADICDIFTRDACALLGLSVESPLSVSFSAGCVALPALINIKAVIEQRQCTGVWNQKDELPIEVDLGKKCWYHSIFACPILRQQTTDNNPPMKLVCGHIISRDALNKMFNGSKLKCPYCPMEQSPGDAKQIFF

SEQ ID NO: 4713 - protein, 737 aa, Homo Sapiens
MVVFNGLLKIKICEAVSLKPTAWSLRHAVGPRPQTFLLDPYIALNVDDSRIGQTATKQKTNSPAWHDEFVTDVCNGRKIELAVFHDAPIGYDDFVANCTIQFEELLQNGSRHFEDWIDLEPEGRVYVIIDLSGSSGEAPKDNEERVFRERMRPRKRQGAVRRRVHQVNGHKFMATYLRQPTYCSHCRDFIWGVIGKQGYQCQVCTCVVHKRCHELIITKCAGLKKQETPDQVGSQRFSVNMPHKFGIHNYKVPTFCDHCGSLLWGLLRQGLQCKVCKMNVHRRCETNVAPNCGVDARGIAKVLADLGVTPDKITNSGQRRKKLIAGAESPQPASGSSPSEEDRSKSAPTSPCDQEIKELENNIRKALSFDNRGEEHRAASSPDGQLMSPGENGEVRQGQAKRLGLDEFNFIKVLGKGSFGKVMLAELKGKDEVYAVKVLKKDVILQDDDVDCTMTEKRILALARKHPYLTQLYCCFQTKDRLFFVMEYVNGGDLMFQIQRSRKFDEPRSRFYAAEVTSALMFLHQHGVIYRDLKLDNILLDAEGHCKLADFGMCKEGILNGVTTTTFCGTPDYIAPEILQELEYGPSVDWWALGVLMYEMMAGQPPFEADNEDDLFESILHDDVLYPVWLSKEAVSILKAFMTKNPHKRLGCVASQNGEDAIKQHPFFKEIDWVLLEQKKIKPPFKPRIKTKRDVNNFDQDFTREEPVLTLVDEAIVKQINQEEFKGFSYFGEDLMP

SEQ ID NO: 4714 - protein, 261 aa, Homo Sapiens
MSTTTCQVVAFLLSILGLAGCIAATGMDMWSTQDLYDNPVTSVFQYEGLWRSCVRQSSGFTECRPYFTILGLPAMLQAVRALMIVGIVLGAIGLLVSIFALKCIRIGSMEDSAKANMTLTSGIMFIVSGLCAIAGVSVFANMLVTNFWMSTANMYTGMGGMVQTVQTRYTFGAALFVGWVAGGLTLIGGVMMCIACRGLAPEETNYKAVSYHASGHSVAYKPGGFKASTGFGSNTKNKKIYDGGARTEDEVQSYPSKHDYV

SEQ ID NO: 4715 - protein, 415 aa, Homo Sapiens
MKLSLTKVVNGCRLGKIKNLGKTGDHTMDIPGCLLYTKTGSAPHLTHHTLHNIHGVPAMAQLTLSSLAEHHEVLTEYKEGVGKFIGMPESLLYCSLHDPVSPCPAGYVTNKSVSVWSVAGRVEMTVSKFMAIQKALQPDWFQCLSDGEVSCKEATSIKRVRKSVDRSLLFLDNCLRLQEESEVLQKSVIIGVIEGGDVMEERLRSARETAKRPVGGFLLDGFQGNPTTLEARLRLLSSVTAELPEDKPRLISGVSRPDEVLECIERGVDLFESFFPYQVTERGCALTFSFDYQPNPEETLLQQNGTQEEIKCMDQIKKIETTGCNQEITSFEINLKEKKYQEDFNPLVRGCSCYCCKNHTRAYIHHLLVTNELLAGVLLMMHNFEHYFGFFHYIREALKSDKLAQLKELIHRQAS

SEQ ID NO: 4716 - protein, 744 aa, Homo Sapiens
MASEGTNIPSPVVRQIDKQFLICSICLERYKNPKVLPCLHTFCERCLQNYIPAHSLTLSCPVCRQTSILPEKGVAALQNNFFITNLMDVLQRTPGSNAEESSILETVTAVAAGKPLSCPNHDGNVMEFYCQSCETAMCRECTEGEHAEHPTVPLKDVVEQHKASLQVQLDAVNKRLPEIDSALQFISEIIHQLTNQKASIVDDIHSTFDELQKTLNVRKSVLLMELEVNYGLKHKVLQSQLDTLLQGQESIKSCSNFTAQALNHGTETEVLLVKKQMSEKLNELADQDFPLHPRENDQLDFIVETEGLKKSIHNLGTILTTNAVASETVATGEGLRQTIIGQPMSVTITTKDKDGELCKTGNAYLTAELSTPDGSVADGEILDNKNGTYEFLYTVQKEGDFTLSLRLYDQHIRGSPFKLKVIRSADVSPTTEGVKRRVKSPGSGHVKQKAVKRPASMYSTGKRKENPIEDDLIFRVGTKGRNKGEFTNLQGVAASTNGKILIADSNNQCVQIFSNDGQFKSRFGIRGRSPGQLQRPTGVAVHPSGDIIIADYDNKWVSIFSSDGKFKTKIGSGKLMGPKGVSVDRNGHIIVVDNKACCVFIFQPNGKIVTRFGSRGNGDRQFAGPHFAAVNSNNEIIITDFHNHSVKVFNQEGEFMLKFGSNGEGNGQFNAPTGVAVDSNGNIIVADWGNSRIQVFDGSGSFLSYINTSADPLYGPQGLALTSDGHVVVADSGNHCFKVYRYLQ

SEQ ID NO: 4717 - protein, 481 aa, Homo Sapiens
MRHSKRTHCPDWDSRESWGHESYRGSHKRKRRSHSSTQENRHCKPHHQFKESDCHYLEARSLNERDYRDRRYVDEYRNDYCEGYVPRHYHRDIESGYRIHCSKSSVRSRRSSPKRKRNRHCSSHQSRSKSHRRKRSRSIEDDEEGHLICQSGDVLRARYEIVDTLGEGAFGKVVECIDHGMDGMHVAVKIVKNVGRYREAARSEIQVLEHLNSTDPNSVFRCVQMLEWFDHHGHVCIVFELLGLSTYDFIKENSFLPFQIDHIRQMAYQICQSINFLHHNKLTHTDLKPENILFVKSDYVVKYNSKMKRDERTLKNTDIKVVDFGSATYDDEHHSTLVSTRHYRAPEVILALGWSQPCDVWSIGCILIEYYLGFTVFQTHDSKEHLAMMERILGPIPQHMIQKTRKRKYFHHNQLDWDEHSSAGRYVRRRCKPLKEFMLCHDEEHEKLFDLVRRMLEYDPTQRITLDEALQHPFFDLLKKK

SEQ ID NO: 4718 - protein, 798 aa, Homo Sapiens
MEAGEGKERVPKQRQVLIFFVLLGIAQASCQPRHYSVAEETESGSFVANLLKDLGLEIGELAVRGARVVSKGKKMHLQFDRQTGDLLLNEKLDREELCGPTEPCVLPFQVLLENPLQFFQAELRIRDVNDHSPVFLDKEILLKIPESITPGTTFLIERAQDLDVGTNSLQNYTISPNFHFHLNLQDSLDGIILPQLVLNRALDREEQPEIRLTLTALDGGSPPRSGTALVRIEVVDINDNVPEFAKLLYEVQIPEDSPVGSQVAIVSARDLDIGTNGEISYAFSQASEDIRKTFRLSAKSGELLLRQKLDFESIQTYTVNIQATDGGGLSGTCVVFVQVMDLNDNPPELTMSTLINQIPENLQDTLIAVFSVSDPDSGDNGRMVCSIQDDLPFFLKPSVENFYTLVISTALDRETRSEYNITITVTDFGTPRLKTEHNITVLVSDVNDNAPAFTQTSYTLFVRENNSPALHIGSVSATDRDSGTNAQVTYSLLPPQDPHLPLASLVSINADNGHLFALQSLDYEALQAFEFRVGAADRGSPALSSEALVRVLVLDANDNSPFVLYPLQNGSAPCTELVPRAAEPGYLVTKVVAVDGDSGQNAWLSYQLLKATEPGLFGVWAHNGEVRTARLLRERDAAKQRLVVLVKDNGEPPRSATATLHVLLVDGFSQPYLLLPEAAPAQAQADLLTVYLVVALASVSSLFLFSVLLFVAVRLCRRSRAASVGRCSVPEGPFPGQMVDVSGTGTLSQSYQYEVCLTGGSGTNEFKFLKPIIPNFVAQGAERVSEANPSFRKSFEFT

SEQ ID NO: 4719 - protein, 346 aa, Homo Sapiens
MAASGKLSTCRLPPLPTIREIIKLLRLQAANELSQNFLLDLRLTDKIVRKAGNLTNAYVYEVGPGPGGITRSILNADVAELLVVEKDTRFIPGLQMLSDAAPGKLRIVHGDVLTFKVEKAFSESLKRPWEDDPPNVHIIGNLPFSVSTPLIIKWLENISCRDGPFVYGRTQMTLTFQKEVAERLAANTGSKQRSRLSVMAQYLCNVRHIFTIPGQAFVPKPEVDVGVVHFTPLIQPKIEQPFKLVEKVVQNVFQFRRKYCHRGLRMLFPEAQRLESTGRLLELADIDPTLRPRQLSISHFKSLCDVYRKMCDEDPQLFAYNFREELKRRKSKNEEKEEDDAENYRL

SEQ ID NO: 4720 - protein, 2347 aa, Homo Sapiens
MKNIYCLIPKLVNFATLGCLWISVVQCTVLNSCLKSCVTNLGQQLDLGTPHNLSEPCIQGCHFWNSVDQKNCALKCRESCEVGCSSAEGAYEEEVLENADLPTAPFASSIGSHNMTLRWKSANFSGVKYIIQWKYAQLLGSWTYTKTVSRPSYVVKPLHPFTEYIFRVVWIFTAQLQLYSPPSPSYRTHPHGVPETAPLIRNIESSSPDTVEVSWDPPQFPGGPILGYNLRLISKNQKLDAGTQRTSFQFYSTLPNTIYRFSIAAVNEVGEGPEAESSITTSSSAVQQEEQWLFLSRKTSLRKRSLKHLVDEAHCLRLDAIYHNITGISVDVHQQIVYFSEGTLIWAKKAANMSDVSDLRIFYRGSGLISSISIDWLYQRMYFIMDELVCVCDLENCSNIEEITPPSISAPQKIVADSYNGYVFYLLRDGIYRADLPVPSGRCAEAVRIVESCTLKDFAIKPQAKRIIYFNDTAQVFMSTFLDGSASHLILPRIPFADVKSFACENNDFLVTDGKVIFQQDALSFNEFIVGCDLSHIEEFGFGNLVIFGSSSQLHPLPGRPQELSVLFGSHQALVQWKPPALAIGANVILISDIIELFELGPSAWQNWTYEVKVSTQDPPEVTHIFLNISGTMLNVPELQSAMKYKVSVRASSPKRPGPWSEPSVGTTLVPASEPPFIMAVKEDGLWSKPLNSFGPGEFLSSDIGNVSDMDWYNNSLYYSDTKGDVFVWLLNGTDISENYHLPSIAGAGALAFEWLGHFLYWAGKTYVIQRQSVLTGHTDIVTHVKLLVNDMVVDSVGGYLYWTTLYSVESTRLNGESSLVLQTQPWFSGKKVIALTLDLSDGLLYWLVQDSQCIHLYTAVLRGQSTGDTTITEFAAWSTSEISQNALMYYSGRLFWINGFRIITTQEIGQKTSVSVLEPARFNQFTIIQTSLKPLPGNFSFTPKVIPDSVQESSFRIEGNASSFQILWNGPPAVDWGVVFYSVEFSAHSKFLASEQHSLPVFTVEGLEPYALFNLSVTPYTYWGKGPKTSLSLRAPETVPSAPENPRIFILPSGKCCNKNEVVVEFRWNKPKHENGVLTKFEIFYNISNQSITNKTCEDWIAVNVTPSVMSFQLEGMSPRCFIAFQVRAFTSKGPGPYADVVKSTTSEINPFPHLITLLGNKIVFLDMDQNQVVWTFSAERVISAVCYTADNEMGYYAEGDSLFLLHLHNRSSSELFQDSLVFDITVITIDWISRHLYFALKESQNGMQVFDVDLEHKVKYPREVKIHNRNSTIISFSVYPLLSRLYWTEVSNFGYQMFYYSIISHTLHRILQPTATNQQNKRNQCSCNVTEFELSGAMAIDTSNLEKPLIYFAKAQEIWAMDLEGCQCWRVITVPAMLAGKTLVSLTVDGDLIYWIITAKDSTQIYQAKKGNGAIVSQVKALRSRHILAYSSVMQPFPDKAFLSLASDTVEPTILNATNTSLTIRLPLAKTNLTWYGITSPTPTYLVYYAEVNDRKNSSDLKYRILEFQDSIALIEDLQPFSTYMIQIAVKNYYSDPLEHLPPGKEIWGKTKNGVPEAVQLINTTVRSDTSLIISWRESHKPNGPKESVRYQLAISHLALIPETPLRQSEFPNGRLTLLVTRLSGGNIYVLKVLACHSEEMWCTESHPVTVEMFNTPEKPYSLVPENTSLQFNWKAPLNVNLIRFWVELQKWKYNEFYHVKTSCSQGPAYVCNITNLQPYTSYNVRVVVVYKTGENSTSLPESFKTKAGVPNKPGIPKLLEGSKNSIQWEKAEDNGCRITYYILEIRKSTSNNLQNQNLRWKMTFNGSCSSVCTWKSKNLKGIFQFRVVAANNLGFGEYSGISENIILVGDDFWIPETSFILTIIVGIFLVVTIPLTFVWHRRLKNQKSAKEGVTVLINEDKELAELRGLAAGVGLANACYAIHTLPTQEEIENLPAFPREKLTLRLLLGSGAFGEVYEGTAVDILGVGSGEIKVAVKTLKKGSTDQEKIEFLKEAHLMSKFNHPNILKQLGVCLLNEPQYIILELMEGGDLLTYLRKARMATFYGPLLTLVDLVDLCVDISKGCVYLERMHFIHRDLAARNCLVSVKDYTSPRIVKIGDFGLARDIYKNDYYRKRGEGLLPVRWMAPESLMDGIFTTQSDVWSFGILIWEILTLGHQPYPAHSNLDVLNYVQTGGRLEPPRNCPDDLWNLMTQCWAQEPDQRPTFHRIQDQLQLFRNFFLNSIYKSRDEANNSGVINESFEGEDGDVICLNSDDIMPVALMETKNREGLNYMVLATECGQGEEKSEGPLGSQESESCGLRKEEKEPHADKDFCQEKQVAYCPSGKPEGLNYACLTHSGYGDGSD

SEQ ID NO: 4721 - protein, 369 aa, Homo Sapiens
MPRAPKRQRCMPEEDLQSQSETQGLEGAQAPLAVEEDASSSTSTSSSFPSSFPSSSSSSSSSCYPLIPSTPEEVSADDETPNPPQSAQIACSSPSVVASLPLDQSDEGSSSQKEESPSTLQVLPDSESLPRSEIDEKVTDLVQFLLFKYQMKEPITKAEILESVIKNYEDHFPLLFSEASECMLLVFGIDVKEVDPTGHSFVLVTSLGLTYDGMLSDVQSMPKTGILILILSIIFIEGYCTPEEVIWEALNMMGLYDGMEHLIYGEPRKLLTQDWVQENYLEYRQVPGSDPARYEFLWGPRAHAEIRKMSLLKFLAKVNGSDPRSFPLWYEEALKDEEERAQDRIATTDDTTAMASASSSATGSFSYPE

SEQ ID NO: 4722 - protein, 838 aa, Homo Sapiens
MQEQEIGFISKYNEGLCVNTDPVSILTSILDMSLHRQMGSDRDLQSSASSVSLPSVKKAPKKRRISIGSLFRRKKDNKRKSRELNGGVDGIASIESIHSEMCTDKNSIFSTNTSSDNGLTSISKQIGDFIECPLCLLRHSKDRFPDIMTCHHRSCVDCLRQYLRIEISESRVNISCPECTERFNPHDIRLILSDDVLMEKYEEFMLRRWLVADPDCRWCPAPDCGYAVIAFGCASCPKLTCGREGCGTEFCYHCKQIWHPNQTCDAARQERAQSLRLRTIRSSSISYSQESGAAADDIKPCPRCAAYIIKMNDGSCNHMTCAVCGCEFCWLCMKEISDLHYLSPSGCTFWGKKPWSRKKKILWQLGTLVGAPVGIALIAGIAIPAMIIGIPVYVGRKIHNRYEGKDVSKHKRNLAIAGGVTLSVIVSPVVAAVTVGIGVPIMLAYVYGVVPISLCRSGGCGVSAGNGKGVRIEFDDENDINVGGTNTAVDTTSVAEARHNPSIGEGSVGGLTGSLSASGSHMDRIGAIRDNLSETASTMALAGASITGSLSGSAMVNCFNRLEVQADVQKERYSLSGESGTVSLGTVSDNASTKAMAGSILNSYIPLDKEGNSMEVQVDIESKPSKFRHNSGSSSVDDGSATRSHAGGSSSGLPEGKSSATKWSKEATAGKKSKSGKLRKKGNMKINETREDMDAQLLEQQSTNSSEFEAPSLSDSMPSVADSHSSHFSEFSCSDLESMKTSCSHGSSDYHTRFATVNILPEVENDRLENSPHQCSISVVTQTASCSEVSQLNHIAEEHGNNGIKPNVDLYFGDALKETNNNHSHQTMELKVAIQTEI

SEQ ID NO: 4723 - protein, 454 aa, Homo Sapiens
MLKQILSEMYIDPDLLAELSEEQKQILFFKMREEQIRRWKEREAAMERKESLPVKPRPKKENGKSVHWKLGADKEVWVWVMGEHHLDKPYDVLCNEIIAERARLKAEQEAEEPRKTHSEEFTNSLKTKSQYHDLQAPDNQQTKDIWKKVAEKEELEQGSRPAPTLEEEKIRSLSSSSRNIQQMLADSINRMKAYAFHQKKESMKKKQDEEINQIEEERTKQICKSWKEDSEWQASLRKSKAADEKRRSLAKQAREDYKRLSLGAQKGRGGERLQSPLRVPQKPERPPLPPKPQFLNSGAYPQKPLRNQGVVRTLSSSAQEDIIRWFKEEQLPLRAGYQKTSDTIAPWFHGILTLKKANELLLSTGMPGSFLIRVSERIKGYALSYLSEDGCKHFLIDASADAYSFLGVDQLQHATLADLVEYHKEEPITSLGKELLLYPCGQQDQLPDYLELFE

SEQ ID NO: 4724 - protein, 2799 aa, Homo Sapiens
MTSIHFVVHPLPGTEDQLNDRLREVSEKLNKYNLNSHPPLNVLEQATIKQCVVGPNHAAFLLEDGRVCRIGFSVQPDRLELGKPDNNDGSKLNSNSGAGRTSRPGRTSDSPWFLSGSETLGRLAGNTLGSRWSSGVGGSGGGSSGRSSAGARDSRRQTRVIRTGRDRGSGLLGSQPQPVIPASVIPEELISQAQVVLQGKSRSVIIRELQRTNLDVNLAVNNLLSRDDEDGDDGDDTASESYLPGEDLMSLLDADIHSAHPSVIIDADAMFSEDISYFGYPSFRRSSLSRLGSSRVLLLPLERDSELLRERESVLRLRERRWLDGASFDNERGSTSKEGEPNLDKKNTPVQSPVSLGEDLQWWPDKDGTKFICIGALYSELLAVSSKGELYQWKWSESEPYRNAQNPSLHHPRATFLGLTNEKIVLLSANSIRATVATENNKVATWVDETLSSVASKLEHTAQTYSELQGERIVSLHCCALYTCAQLENSLYWWGVVPFSQRKKMLEKARAKNKKPKSSAGISSMPNITVGTQVCLRNNPLYHAGAVAFSISAGIPKVGVLMESVWNMNDSCRFQLRSPESLKNMEKASKTTEAKPESKQEPVKTEMGPPPSPASTCSDASSIASSASMPYKRRRSTPAPKEEEKVNEEQWSLREVVFVEDVKNVPVGKVLKVDGAYVAVKFPGTSSNTNCQNSSGPDADPSSLLQDCRLLRIDELQVVKTGGTPKVPDCFQRTPKKLCIPEKTEILAVNVDSKGVHAVLKTGNWVRYCIFDLATGKAEQENNFPTSSIAFLGQNERNVAIFTAGQESPIILRDGNGTIYPMAKDCMGGIRDPDWLDLPPISSLGMGVHSLINLPANSTIKKKAAVIIMAVEKQTLMQHILRCDYEACRQYLMNLEQAVVLEQNLQMLQTFISHRCDGNRNILHACVSVCFPTSNKETKEEEEAERSERNTFAERLSAVEAIANAISVVSSNGPGNRAGSSSSRSLRLREMMRRSLRAAGLGRHEAGASSSDHQDPVSPPIAPPSWVPDPPAMDPDGDIDFILAPAVGSLTTAATGTGQGPSTSTIPGPSTEPSVVESKDRKANAHFILKLLCDSVVLQPYLRELLSAKDARGMTPFMSAVSGRAYPAAITILETAQKIAKAEISSSEKEEDVFMGMVCPSGTNPDDSPLYVLCCNDTCSFTWTGAEHINQDIFECRTCGLLESLCCCTECARVCHKGHDCKLKRTSPTAYCDCWEKCKCKTLIAGQKSARLDLLYRLLTATNLVTLPNSRGEHLLLFLVQTVARQTVEHCQYRPPRIREDRNRKTASPEDSDMPDHDLEPPRFAQLALERVLQDWNALKSMIMFGSQENKDPLSASSRIGHLLPEEQVYLNQQSGTIRLDCFTHCLIVKCTADILLLDTLLGTLVKELQNKYTPGRREEAIAVTMRFLRSVARVFVILSVEMASSKKKNNFIPQPIGKCKRVFQALLPYAVEELCNVAESLIVPVRMGIARPTAPFTLASTSIDAMQGSEELFSVEPLPPRPSSDQSSSSSQSQSSYIIRNPQQRRISQSQPVRGRDEEQDDIVSADVEEVEVVEGVAGEEDHHDEQEEHGEENAEAEGQHDEHDEDGSDMELDLLAAAETESDSESNHSNQDNASGRRSVVTAATAGSEAGASSVPAFFSEDDSQSNDSSDSDSSSSQSDDIEQETFMLDEPLERTTNSSHANGAAQAPRSMQWAVRNTQHQRAASTAPSSTSTPAASSAGLIYIDPSNLRRSGTISTSAAAAAAALEASNASSYLTSASSLARAYSIVIRQISDLMGLIPKYNHLVYSQIPAAVKLTYQDAVNLQNYVEEKLIPTWNWMVSIMDSTEAQLRYGSALASAGDPGHPNHPLHASQNSARRERMTAREEASLRTLEGRRRATLLSARQGMMSARGDFLNYALSLMRSHNDEHSDVLPVLDVCSLKHVAYVFQALIYWIKAMNQQTTLDTPQLERKRTRELLELGIDNEDSEHENDDDTNQSATLNDKDDDSLPAETGQNHPFFRRSDSMTFLGCIPPNPFEVPLAEAIPLADQPHLLQPNARKEDLFGRPSQGLYSSSASSGKCLMEVTVDRNCLEVLPTKMSYAANLKNVMNMQNRQKKEGEEQPVLPEETESSKPGPSAHDLAAQLKSSLLAEIGLTESEGPPLTSFRPQCSFMGMVISHDMLLGRWRLSLELFGRVFMEDVGAEPGSILTELGGFEVKESKFRREMEKLRNQQSRDLSLEVDRDRDLLIQQTMRQLNNHFGRRCATTPMAVHRVKVTFKDEPGEGSGVARSFYTAIAQAFLSNEKLPNLECIQNANKGTHTSLMQRLRNRGERDREREREREMRRSSGLRAGSRRDRDRDFRRQLSIDTRPFRPASEGNPSDDPEPLPAHRQALGERLYPRVQAMQPAFASKITGMLLELSPAQLLLLLASEDSLRARVDEAMELIIAHGRENGADSILDLGLVDSSEKVQQENRKRHGSSRSVVDMDLDDTDDGDDNAPLFYQPGKRGFYTPRPGKNTEARLNCFRNIGRILGLCLLQNELCPITLNRHVIKVLLGRKVNWHDFAFFDPVMYESLRQLILASQSSDADAVFSAMDLAFAIDLCKEEGGGQVELIPNGVNIPVTPQNVYEYVRKYAEHRMLVVAEQPLHAMRKGLLDVLPKNSLEDLTAEDFRLLVNGCGEVNVQMLISFTSFNDESGENAEKLLQFKRWFWSIVEKMSMTERQDLVYFWTSSPSLPASEEGFQPMPSITIRPPDDQHLPTANTCISRLYVPLYSSKQILKQKLLLAIKTKNFGFV

SEQ ID NO: 4725 - protein, 748 aa, Homo Sapiens
MSNPGGRRNGPVKLRLTVLCAKNLVKKDFFRLPDPFAKVVVDGSGQCHSTDTVKNTLDPKWNQHYDLYIGKSDSVTISVWNHKKIHKKQGAGFLGCVRLLSNAINRLKDTGYQRLDLCKLGPNDNDTVRGQIVVSLQSRDRIGTGGQVVDCSRLFDNDLPDGWEERRTASGRIQYLNHITRTTQWERPTRPASEYSSPGRPLSCFVDENTPISGTNGATCGQSSDPRLAERRVRSQRHRNYMSRTHLHTPPDLPEGYEQRTTQQGQVYFLHTQTGVSTWHDPRVPRDLSNINCEELGPLPPGWEIRNTATGRVYFVDHNNRTTQFTDPRLSANLHLVLNRQNQLKDQQQQQVVSLCPDDTECLTVPRYKRDLVQKLKILRQELSQQQPQAGHCRIEVSREEIFEESYRQVMKMRPKDLWKRLMIKFRGEEGLDYGGVAREWLYLLSHEMLNPYYGLFQYSRDDIYTLQINPDSAVNPEHLSYFHFVGRIMGMAVFHGHYIDGGFTLPFYKQLLGKSITLDDMELVDPDLHNSLVWILENDITGVLDHTFCVEHNAYGEIIQHELKPNGKSIPVNEENKKEYVRLYVNWRFLRGIEAQFLALQKGFNEVIPQHLLKTFDEKELELIICGLGKIDVNDWKVNTRLKHCTPDSNIVKWFWKAVEFFDEERRARLLQFVTGSSRVPLQGFKALQGAAGPRLFTIHQIDACTNNLPKAHTCFNRIDIPPYESYEKLYEKLLTAIEETCGFAVE

SEQ ID NO: 4726 - protein, 419 aa, Homo Sapiens
MAAEVLPSARWQYCGAPDGSQRAVLVQFSNGKLQSPGNMRFTLYENKDSTNPRKRNQRILAAETDRLSYVGNNFGTGALKCNTLCRHFVGILNKTSGQMEVYDAELFNMQPLFSDVSVESELALESQTKTYREKMDSCIEAFGTTKQKRALNTRRMNRVGNESLNRAVAKAAETIIDTKGVTALVSDAIHNDLQDDSLYLPPCYDDAAKPEDVYKFEDLLSPAEYEALQSPSEAFRNVTSEEILKMIEENSHCTFVIEALKSLPSDVESRDRQARCIWFLDTLIKFRAHRVVKRKSALGPGVPHIINTKLLKHFTCLTYNNGRLRNLISDSMKAKITAYVIILALHIHDFQIDLTVLQRDLKLSEKRMMEIAKAMRLKISKRRVSVAAGSEEDHKLGTLSLPLPPAQTSDRLAKRRKIT

SEQ ID NO: 4727 - protein, 397 aa, Homo Sapiens
MVKETTYYDVLGVKPNATQEELKKAYRKLALKYHPDKNPNEGEKFKQISQAYEVLSDAKKRELYDKGGEQAIKEGGAGGGFGSPMDIFDMFFGGGGRMQRERRGKNVVHQLSVTLEDLYNGATRKLALQKNVICDKCEGRGGKKGAVECCPNCRGTGMQIRIHQIGPGMVQQIQSVCMECQGHGERISPKDRCKSCNGRKIVREKKILEVHIDKGMKDGQKITFHGEGDQEPGLEPGDIIIVLDQKDHAVFTRRGEDLFMCMDIQLVEALCGFQKPISTLDNRTIVITSHPGQIVKHGDIKCVLNEGMPIYRRPYEKGRLIIEFKVNFPENGFLSPDKLSLLEKLLPERKEVEETDEMDQVELVDFDPNQERRRHYNGEAYEDDEHHPRGGVQCQTS

SEQ ID NO: 4728 - protein, 369 aa, Homo Sapiens
MSTGLRYKSKLATPEDKQDIDKQYVGFATLPNQVHRKSVKKGFDFTLMVAGESGLGKSTLVHSLFLTDLYKDRKLLSAEERISQTVEILKHTVDIEEKGVKLKLTIVDTPGFGDAVNNTECWKPITDYVDQQFEQYFRDESGLNRKNIQDNRVHCCLYFISPFGHGLRPVDVGFMKALHEKVNIVPLIAKADCLVPSEIRKLKERIREEIDKFGIHVYQFPECDSDEDEDFKQQDRELKESAPFAVIGSNTVVEAKGQRVRGRLYPWGIVEVENQAHCDFVKLRNMLIRTHMHDLKDVTCDVHYENYRAHCIQQMTSKLTQDSRMESPIPILPLPTPDAETEKLIRMKDEELRRMQEMLQRMKQQMQDQ

SEQ ID NO: 4729 - protein, 315 aa, Homo Sapiens
MSLEQRSPHCKPDEDLEAQGEDLGLMGAQEPTGEEEETTSSSDSKEEEVSAAGSSSPPQSPQGGASSSISVYYTLWSQFDEGSSSQEEEEPSSSVDPAQLEFMFQEALKLKVAELVHFLLHKYRVKEPVTKAEMLESVIKNYKRYFPVIFGKASEFMQVIFGTDVKEVDPAGHSYILVTALGLSCDSMLGDGHSMPKAALLIIVLGVILTKDNCAPEEVIWEALSVMGVYVGKEHMFYGEPRKLLTQDWVQENYLEYRQVPGSDPAHYEFLWGSKAHAETSYEKVINYLVMLNAREPICYPSLYEEVLGEEQEGV

SEQ ID NO: 4730 - protein, 2559 aa, Homo Sapiens
MAQVPGEVDNMEGLPAPNNNPAARWESPDRGWEREQPAASTAAASLFECSRIKALADEREAVQKKTFTKWVNSHLARVGCHIGDLYVDLRDGFVLTRLLEVLSGEQLPRPTRGRMRIHSLENVDKALQFLKEQRVHLENVGSHDIVDGNHRLTLGLVWTIILRFQIQVIKIETEDNRETRSAKDALLLWCQMKTAGYPEVNIQNFTTSWRDGLAFNALIHRHRPDLVDFSKLTKSNANYNLQRAFRTAEQHLGLARLLDPEDVNMEAPDEKSIITYVVSFYHYFSKMKALAVEGKRIGKVLDQVLEVGKIIERYEELAAELLAWIHRTVGLISNQKFANSLSGVQQQLQAFTAYCTLEKPVKFQEKGNLEVLLFSIQSKLRACNRRLFVPREGCGIWDIDKAWGELEKAEHEREAALRAELIRQEKLELLAQRFDHKVAMRESWLNENQRLVSQDNFGYELPAVEAAMKKHEAIEADIAAYEERVQGVAELAQALAAEGYYDIRRVAAQRDSVLRQWALLTGLVGARRTRLEQNLALQKVFQEMVYMVDWMEEMQAQLLSRECGQHLVEADDLLQKHGLLEGDIAAQSERVEALNAAALRFSQPCDPQVICNRVNHVHGCLAELQEQAARRRAELEASRSLWALLQELEEAESWARDKERLLEAAGGGGAAGAAGAAGTAGGAHDLSSTARLLAQHKILQGELGGRRASLQQALRCGEELVAAGGAVGPGADTVHLVGLAERAASARRRWQRLEEAAARRERRLQEARALHQFGADLDGLLDWLRDAYRLAAAGDFGHDEASSRRLARQHRALTGEVEAHRGPVSGLRRQLATLGGASGAGPLVVALQVRVVEAEQLFAEVTEVAALRRQWLRDALAVYRMFGEVHACELWIGEKEQWLLSMRVPDSLDDVEVVQHRFESLDQEMNSLMGRVLDVNHTVQELVEGGHPSSDEVRSCQDHLNSRWNRIVELVEQRKEEMSAVLLVENHVLEVAEVRAQVREKRRAVESAPRAGGALQWRLSGLEAALQALEPRQAALLEEAALLAERFPAQAARLHQGAEELGAEWGALASAAQACGEAVAAAGRLQRFLHDLDAFLDWLVRAQEAAGGSEGPLPNSLEEADALLARHAALKEEVDQREEDYARIVAASEALLAADGAELGPGLALDEWLPHLELGWHKLLGLWKARRKALVQAHIYQLFLRDLRQALVVLRNQEMALSGAELPGTVESVEEALKQHRDFLTTMELSQQKMQVAVQAAEGLLRQGNIYGEQAQEAVTRLLEKNQENQLRAQQWMQKLHDQLELQHFLRDCHELDGWIHEKMLMARDGTREDNHKLHKRWLRHQAFMAELAQNKEWLEKIEREGQQLMQEKPELAASVRKKLGEIRQCWAELESTTQAKARQLFEASKADQLVQSFAELDKKLLHMESQLQDVDPGGDLATVNSQLKKLQSMESQVEEWYREVGELQAQTAALPLEPASKELVGERQNAVGERLVRLLEPLQERRRLLLASKELHQVAHDLDDELAWVQERLPLAMQTERGNGLQAVQQHIKKNQGLRREIQAHGPRLEEVLERAGALASLRSPEAEAVRRGLEQLQSAWAGLREAAERRQQVLDAAFQVEQYYFDVAEVEAWLGEQELLMMSEDKGKDEQSTLQLLKKHLQLEQGVENYEESIAQLSRQCRALLEMGHPDSEQISRRQSQVDRLYVALKELGEERRVALEQQYWLYQLSRQVSELEHWIAEKEVVAGSPELGQDFEHVSVLQEKFSEFASETGMAGRERLAAVNQMVDELIECGHTAAATMAEWKDGLNEAWAELLELMGTRAQLLAASRELHKFFSDARELQGQIEEKRRRLPRLTTPPEPRPSASSMQRTLRAFEHDLQLLVSQVRQLQEGAAQLRTVYAGEHAEAIASREQEVLQGWKELLSACEDARLHVSSTADALRFHSQVRDLLSWMDGIASQIGAADKPRDVSSVEVLMNYHQGLKTELEARVPELTTCQELGRSLLLNKSAMADEIQAQLDKLGTRKEEVSEKWDRHWEWLQQMLEVHQFAQEAVVADAWLTAQEPLLQSRELGSSVDEVEQLIRRHEAFRKAAAAWEERFSSLRRLTTIEKIKAEQSKQPPTPLLGRKFFGDPTELAAKAAPLLRPGGYERGLEPLARRASDTLSAEVRTRVGYVRQELKPERLQPRIDRLPEIPGRVEPAALPAAPEDAAETPATPAAAEQVRPRPERQESADRAEELPRRRRPERQESVDQSEEAARRRRPERQESAEHEAAHSLTLGRYEQMERRRERRERRLERQESSEQEMPIRGDLVKGKATLADIVEQLQEKEAGPGLPAGPSLPQPRELPPGRLPNGLELPERTPRPDRPRARDRPKPRRRPRPREGGEGGGSRRSRSAPAQGGSAPAPPPPPTHTVQHEGFLLRKRELDANRKSSNRSWVSLYCVLSKGELGFYKDSKGPASGSTHGGEPLLSLHKATSEVASDYKKKKHVFKLQTQDGSEFLLQAKDEEEMNGWLEAVASSVAEHAEIARWGQTLPTTSSTDEGNPKREGGDRRASGRRK

SEQ ID NO: 4731 - protein, 217 aa, Homo Sapiens [sequence omitted]

SEQ ID NO: 4732 - protein, 707 aa, Homo Sapiens
MLGSLVLRRKALAPRLLLRLLRSPTLRGHGGASGRNVTTGSLGEPQWLRVATGGRPGTSPALFSGRGAATGGRQGGRFDTKCLAAATWGRLPGPEETLPGQDSWNGVPSRAGLGMCALAAALVVHCYSKSPSNKDAALLEAARANNMQEVSRLLSEGADVNAKHRLGWTALMVAAINRNNSVVQVLLAAGADPNLGDDFSSVYKTAKEQGIHSLEDGGQDGASRHITNQWTSALEFRRWLGLPAGVLITREDDFNNRLNNRASFKGCTALHYAVLADDYRTVKELLDGGANPLQRNEMGHTPLDYAREGEVMKLLRTSEAKYQEKQRKREAEERRRFPLEQRLKEHIIGQESAIATVGAAIRRKENGWYDEEHPLVFLFLGSSGIGKTELAKQTAKYMHKDAKKGFIRLDMSEFQERHEVAKFIGSPPGYVGHEEGGQLTKKLKQCPNAVVLFDEVDKAHPDVLTIMLQLFDEGRLTDGKGKTIDCKDAIFIMTSNVASDEIAQHALQLRQEALEMSRNRIAENLGDVQISDKITISKNFKENVIRPILKAHFRRDEFLGRINEIVYFLPFCHSELIQLVNKELNFWAKRAKQRHNITLLWDREVADVLVDGYNVHYGARSIKHEVERRVVNQLAAAYEQDLLPGGCTLRITVEDSDKQLLKSPELPSPQAEKRLPKLRLEIIDKDSKTRRLDIRAPLHPEKVCNTI

SEQ ID NO: 4733 - protein, 334 aa, Homo Sapiens
MSKLLNPEEMTSRDYYFDSYAHFGIHEEMLKDEVRTLTYRNSMYHNKHVFKDKVVLDVGSGTGILSMFAAKAGAKKVFGIECSSISDYSQKIIKANHLDNIITIFKGKVEEVELPVEKVDIIISEWMGYCLFYESMLNTVIFARDKWLKPGGLMFPDRAALYVVAIEDRQYKDFKIHWWENVYGFDMTCIRDVAMKEPLVDIVDPKQVVTNACLIKEVDIYTVKTEELSFTSAFCLQIQRNDYVHALVTYFNIEFTKCHKKMGFSTAPDAPYTHWKQTVFYLEDYLTVRRGEEIYGTISMKPNAKNVRDLDFTVDLDFKGQLCETSVSNDYKMR

SEQ ID NO: 4734 - protein, 839 aa, Homo Sapiens
MEQWRQCGRWLIDCKVLPPNHRVVWPSAVVFDLAQALRDGVLLCQLLHNLSPGSIDLKDINFRPQMSQFLCLKNIRTFLKVCHDKFGLRNSELFDPFDLFDVRDFGKVISAVSRLSLHSIAQNKGIRPFPSEETTENDDDVYRSLEELADEHDLGEDIYDCVPCEDGGDDIYEDIIKVEVQQPMKMGMTEDDKRNCCLLEIQETEAKYYRTLEDIEKNYMSPLRLVLSPADMAAVFINLEDLIKVHHSFLRAIDVSVMVGGSTLAKVFLDFKERLLIYGEYCSHMEHAQNTLNQLLASREDFRQKVEECTLKVQDGKFKLQDLLVVPMQRVLKYHLLLKELLSHSAERPERQQLKEALEAMQDLAMYINEVKRDKETLRKISEFQSSIENLQVKLEEFGRPKIDGELKVRSIVNHTKQDRYLFLFDKVVIVCKRKGYSYELKEIIELLFHKMTDDPMNNKDVKKWSYGFYLIHLQGKQGFQFFCKTEDMKRKWMEQFEMAMSNIKPDKANANHHSFQMYTFDKTTNCKACKMFLRGTFYQGYMCTKCGVGAHKECLEVIPPCKFTSPADLDASGAGPGPKMVAMQNYHGNPAPPGKPVLTFQTGDVLELLRGDPESPWWEGRLVQTRKSGYFPSSSVKPCPVDGRPPISRPPSREIDYTAYPWFAGNMERQQTDNLLKSHASGTYLIRERPAEAERFAISIKFNDEVKHIKVVEKDNWIHITEAKKFDSLLELVEYYQCHSLKESFKQLDTTLKYPYKSRERSASRASSRSPVFTPRVIGTAVARYNFAARDMRELSLREGDVVRIYSRIGGDQGWWKGETNGRIGWFPSTYVEEEGIQ

SEQ ID NO: 4735 - protein, 839 aa, Homo Sapiens; identical to SEQ ID NO: 4734

SEQ ID NO: 4736 - protein, 248 aa, Homo Sapiens
MADFDTYDDRAYSSFGGGRGSRGSAGGHGSRSQKELPTEPPYTAYVGNLPFNTVQGDIDAIFKDLSIRSVRLVRDKDTDKFKGFCYVEFDEVDSLKEALTYDGALLGDRSLRVDIAEGRKQDKGGFGFRKGGPDDRGMGSSRESRGGWDSRDDFNSGFRDDFLGGRGGSRPGDRRTGPPMGSRFRDGPPLRGSNMDFREPTEEERAQRPRLQLKPRTVATPLNQVANPNSAIFGGARPREEVVQKEQE

SEQ ID NO: 4737 - protein, 251 aa, Homo Sapiens
MLGARLRLWVCALCSVCSMSVLRAYPNASPLLGSSWGGLIHLYTATARNSYHLQIHKNGHVDGAPHQTIYSALMIRSEDAGFVVITGVMSRRYLCMDFRGNIFGSHYFDPENCRFQHQTLENGYDVYHSPQYHFLVSLGRAKRAFLPGMNPPPYSQFLSRRNEIPLIHFNTPIPRRHTRSAEDDSERDPLNVLKPRARMTPAPASCSQELPSAEDNSPMASDPLGVVRGGRVNTHAGGTGPEGCRPFAKFI

SEQ ID NO: 4738 - protein, 773 aa, Homo Sapiens
METDESPSPLPCGPAGEAVMESRARPFQALPREQSPPPPLQTSSGAEVMDVGSGGDGQSELPAEDPFNFYGASLLSKGSFSKGRLLIDPNCSGHSPRTARHAPAVRKFSPDLKLLKDVKISVSFTESCRSKDRKVLYTGAERDVRAECGLLLSPVSGDVHACPFGGSVGDGVGIGGESADKKDEENELDQEKRVEYAVLDELEDFTDNLELDEEGAGGFTAKAIVQRDRVDEEALNFPYEDDFDNDVDALLEEGLCAPKKRRTEEKYGGDSDHPSDGETSVQPMMTKIKTVLKSRGRPPTEPLPDGWIMTFHNSGVPVYLHRESRVVTWSRPYFLGTGSIRKHDPPLSSIPCLHYKKMKDNEEREQSSDLTPSGDVSPVKPLSRSAELEFPLDEPDSMGADPGPPDEKDPLGAEAAPGALGQVKAKVEVCKDESVDLEEFRSYLEKRFDFEQVTVKKFRTWAERRQFNREMKRKQAESERPILPANQKLITLSVQDAPTKKEFVINPNGKSEVCILHEYMQRVLKVRPVYNFFECENPSEPFGASVTIDGVTYGSGTASSKKLAKNKAARATLEILIPDFVKQTSEEKPKDSEELEYFNHISIEDSRVYELTSKAGLLSPYQILHECLKRNHGMGDTSIKFEVVPGKNQKSEYVMACGKHTVRGWCKNKRVGKQLASQKILQLLHPHVKNWGSLLRMYGRESSKMVKQETSDKSVIELQQYAKKNKPNLHILSKLQEEMKRLAEEREETRKKPKMSIVASAQPGGEPLCTVDV

SEQ ID NO: 4739 - protein, 1487 aa, Homo Sapiens
MIRLGAPQSLVLLTLLVAAVLRCQGQDVQEAGSCVQDGQRYNDKDVWKPEPCRICVCDTGTVLCDDIICEDVKDCLSPEIPFGECCPICPTDLATASGQPGPKGQKGEPGDIKDIVGPKGPPGPQGPAGEQGPRGDRGDKGEKGAPGPRGRDGEPGTPGNPGPPGPPGPPGPPGLGGNFAAQMAGGFDEKAGGAQLGVMQGPMGPMGPRGPPGPAGAPGPQGFQGNPGEPGEPGVSGPMGPRGPPGPPGKPGDDGEAGKPGKAGERGPPGPQGARGFPGTPGLPGVKGHRGYPGLDGAKGEAGAPGVKGESGSPGENGSPGPMGPRGLPGERGRTGPAGAAGARGNDGQPGPAGPPGPVGPAGGPGFPGAPGAKGEAGPTGARGPEGAQGPRGEPGTPGSPGPAGASGNPGTDGIPGAKGSAGAPGIAGAPGFPGPRGPPGPQGATGPLGPKGQTGEPGIAGFKGEQGPKGEPGPAGPQGAPGPAGEEGKRGARGEPGGVGPIGPPGERGAPGNRGFPGQDGLAGPKGAPGERGPSGLAGPKGANGDPGRPGEPGLPGARGLTGRPGDAGPQGKVGPSGAPGEDGRPGPPGPQGARGQPGVMGFPGPKGANGEPGKAGEKGLPGAPGLRGLPGKDGETGAAGPPGPAGPAGERGEQGAPGPSGFQGLPGPPGPPGEGGKPGDQGVPGEAGAPGLVGPRGERGFPGERGSPGAQGLQGPRGLPGTPGTDGPKGASGPAGPPGAQGPPGLQGMPGERGAAGIAGPKGDRGDVGEKGPEGAPGKDGGRGLTGPIGPPGPAGANGEKGEVGPPGPAGSAGARGAPGERGETGPPGPAGFAGPPGADGQPGAKGEQGEAGQKGDAGAPGPQGPSGAPGPQGPTGVTGPKGARGAQGPPGATGFPGAAGRVGPPGSNGNPGPPGPPGPSGKDGPKGARGDSGPPGRAGEPGLQGPAGPPGEKGEPGDDGPSGAEGPPGPQGLAGQRGIVGLPGQRGERGFPGLPGPSGEPGKQGAPGASGDRGPPGPVGPPGLTGPAGEPGREGSPGADGPPGRDGAAGVKGDRGETGAVGAPGAPGPPGSPGPAGPTGKQGDRGEAGAQGPMGPSGPAGARGIQGPQGPRGDKGEAGEPGERGLKGHRGFTGLQGLPGPPGPSGDQGASGPAGPSGPRGPPGPVGPSGKDGANGIPGPIGPPGPRGRSGETGPAGPPGNPGPPGPPGPPGPGIDMSAFAGLGPREKGPDPLQYMRADQAAGGLRQHDAEVDATLKSLNNQIESIRSPEGSRKNPARTCRDLKLCHPEWKSGDYWIDPNQGCTLDAMKVFCNMETGETCVYPNPANVPKKNWWSSKSKEKKHIWFGETINGGFHFSYGDDNLAPNTANVQMTFLRLLSTEGSQNITYHCKNSIAYLDEAAGNLKKALLIQGSNDVEIRAEGNSRFTYTALKDGCTKHTGKWGKTVIEYRSQKTSRLPIIDIAPMDIGGPEQEFGVDIGPVCFL

SEQ ID NO: 4740 - protein, 317 aa, Homo Sapiens
MSSEQKSQHCKPEEGVEAQEEALGLVGAQAPTTEEQEAAVSSSSPLVPGTLEEVPAAESAGPPQSPQGASALPTTISFTCWRQPNEGSSSQEEEGPSTSPDAESLFREALSNKVDELAHFLLRKYRAKELVTKAEMLERVIKNYKRCFPVIFGKASESLKMIFGIDVKEVDPTSNTYTLVTCLGLSYDGLLGNNQIFPKTGLLIIVLGTIAMEGDSASEEEIWEELGVMGVYDGREHTVYGEPRKLLTQDWVQENYLEYRQVPGSNPARYEFLWGPRALAETSYVKVLEHVVRVNARVRIAYPSLREAALLEEEEGV

SEQ ID NO: 4741 - protein, 314 aa, Homo Sapiens
MPLEQRSQHCKPEEGLEAQGEALGLVGAQAPATEEQETASSSSTLVEVTLREVPAAESPSPPHSPQGASTLPTTINYTLWSQSDEGSSNEEQEGPSTFPDLETSFQVALSRKMAELVHFLLLKYRAREPFTKAEMLGSVIRNFQDFFPVIFSKASEYLQLVFGIEVVEVVRIGHLYILVTCLGLSYAGLLGDNQIVPKTGLLIIVLAIIAKEGDCAPEEKIWEELSVLEASDGREDSVFAHPRKLLTQDLVQENYLEYRQVPGSDPACYEFLWGPRALVETSYVKVLHHLLKISGGPHIPYPPLHEWAFREGEE

SEQ ID NO: 4742 - protein, 1360 aa, Homo Sapiens
MSRQSTLYSFFPKSPALSDANKASARASREGGRAAAAPGASPSPGGDAAWSEAGPGPRPLARSASPPKAKNLNGGLRRSVAPAAPTSCDFSPGDLVWAKMEGYPWWPCLVYNHPFDGTFIREKGKSVRVHVQFFDDSPTRGWVSKRLLKPYTGSKSKEAQKGGHFYSAKPEILRAMQRADEALNKDKIKRLELAVCDEPSEPEEEEEMEVGTTYVTDKSEEDNEIESEEEVQPKTQGSRRSSRQIKKRRVISDSESDIGGSDVEFKPDTKEEGSSDEISSGVGDSESEGLNSPVKVARKRKRMVTGNGSLKRKSSRKETPSATKQATSISSETKNTLRAFSAPQNSESQAHVSGGGDDSSRPTVWYHETLEWLKEEKRRDEHRRRPDHPDFDASTLYVPEDFLNSCTPGMRKWWQIKSQNFDLVICYKVGKFYELYHMDALIGVSELGLVFMKGNWAHSGFPEIAFGRYSDSLVQKGYKVARVEQTETPEMMEARCRKMAHISKYDRVVRREICRIITKGTQTYSVLEGDPSENYSKYLLSLKEKEEDSSGHTRAYGVCFVDTSLGKFFIGQFSDDRHCSRFRTLVAHYPPVQVLFEKGNLSKETKTILKSSLSCSLQEGLIPGSQFWDASKTLRTLLEEEYFREKLSDGIGVMLPQVLKGMTSESDSIGLTPGEKSELALSALGGCVFYLKKCLIDQELLSMANFEEYIPLDSDTVSTTRSGAIFTKAYQRMVLDAVTLNNLEIFLNGTNGSTEGTLLERVDTCHTPFGKRLLKQWLCAPLCNHYAINDRLDAIEDLMVVPDKISEVVELLKKLPDLERLLSKIHNVGSPLKSQNHPDSRAIMYEETTYSKKKIIDFLSALEGFKVMCKIIGIMEEVADGFKSKILKQVISLQTKNPEGRFPDLTVELNRWDTAFDHEKARKTGLITPKAGFDSDYDQALADIRENEQSLLEYLEKQRNRIGCRTIVYWGIGRNRYQLEIPENFTTRNLPEEYELKSTKKGCKRYWTKTIEKKLANLINAEERRDVSLKDCMRRLFYNFDKNYKDWQSAVECIAVLDVLLCLANYSRGGDGPMCRPVILLPEDTPPFLELKGSRHPCITKTFFGDDFIPNDILIGCEEEEQENGKAYCVLVTGPNMGGKSTLMRQAGLLAVMAQMGCYVPAEVCRLTPIDRVFTRLGASDRIMSGESTFFVELSETASILMHATAHSLVLVDELGRGTATFDGTAIANAVVKELAETIKCRTLFSTHYHSLVEDYSQNVAVRLGHMACMVENECEDPSQETITFLYKFIKGACPKSYGFNAARLANLPEEVIQKGHRKAREFEKMNQSLRLFREVCLASERSTVDAEAVHKLLTLIKEL

SEQ ID NO: 4743 - protein, 79 aa, Homo Sapiens
MKVTGIFLLSALALLSLSGNTGADSLGREAKCYNELNGCTKIYDPVCGTDGNTYPNECVLCFEGRKRQTSILIQKSGPC

SEQ ID NO: 4744 - protein, 359 aa, Homo Sapiens
MPAHLLQDDISSSYTTTTTITAPPPGVLQNGGDKLETMPLYLEDDIRPDIKDDIYDPTYKDKEGPSPKVEYVWRNIILMSLLHLGALYGITLIPTCKFYTWLWGVFYYFVSALGITAGAHRLWSHRSYKARLPLRLFLIIANTMAFQNDVYEWARDHRAHHKFSETHADPHNSRRGFFFSHVGWLLVRKHPAVKEKGSTLDLSDLEAEKLVMFQRRYYKPGLLMMCFILPTLVPWYFWGETFQNSVFVATFLRYAVVLNATWLVNSAAHLFGYRPYDKNISPRENILVSLGAVGEGFHNYHHSFPYDYSASEYRWHINFNTFFIDWMAALGLTYDRKKVSKAAILARIKRTGDGNYKSG

SEQ ID NO: 4745 - protein, 344 aa, Homo Sapiens
MGPPSAPPCRLHVPWKEVLLTASLLTFWNPPTTAKLTIESTPFNVAEGKEVLLLAHNLPQNRIGYSWYKGERVDGNSLIVGYVIGTQQATPGPAYSGRETIYPNASLLIQNVTQNDTGFYTLQVIKSDLVNEEATGQFHVYPELPKPSISSNNSNPVEDKDAVAFTCEPEVQNTTYLWWVNGQSLPVSPRLQLSNGNMTLTLLSVKRNDAGSYECEIQNPASANRSDPVTLNVLYGPDVPTISPSKANYRPGENLNLSCHAASNPPAQYSWFINGTFQQSTQELFIPNITVNNSGSYMCQAHNSATGLNRTTVTMITVSGSAPVLSAVATVGITIGVLARVALI

SEQ ID NO: 4746 - protein, 189 aa, Homo Sapiens
KLPKPYITINNLNPRDNKDVSTFTCEPKSENYTYIWWLNGQSLPVSPRVKRRIENRILILPSVTRNETGPYQCEIRDRYGGIRSDPVTLNVLYGPDLPRIYPSFTYYHSGQNLYLSCFADSNPPAQYSWTINGKFQLSGQKLSIPQITTKHSGLYACSVRNSATGKESSKSVTVRVSGKWIPASLAIGF

SEQ ID NO: 4747 - protein, 351 aa, Homo Sapiens
LLLVHNLPQNLPGYFWYKGEMTDLYHYIISYIVDGKIIIYGPAYSGRETVYSNASLLIQNVTRKDAGTYTLHIIKRGDETREEIRHFTFTLYLETPKPYISSSNLNPREAMEAVRLICDPETLDASYLWWMNGQSLPVTHRLQLSKTNRTLYLFGVTKYIAGPYECEIRNPVSAIRSDPVTLNLLHGPDLPRIYPSFTYYRSGENLDLSCFTESNPPAEYFWTINGKFQQSGQKLFIPQITRNHSGLYACSVHNSATGKEISKSMTVKVSGKWIPASLAVGFYVESIWLSEKSQENIFIPSLCPMGTSKSQILLLNPPNLSLQTLFSLFFCFLMADLVSGLKKVGRGLYQP

SEQ ID NO: 4748 - protein, 702 aa, Homo Sapiens
MESPSAPPHRWCIPWQRLLLTASLLTFWNPPTTAKLTIESTPFNVAEGKEVLLLVHNLPQHLFGYSWYKGERVDGNRQIIGYVIGTQQATPGPAYSGREIIYPNASLLIQNIIQNDTGFYTLHVIKSDLVNEEATGQFRVYPELPKPSISSNNSKPVEDKDAVAFTCEPETQDATYLWWVNNQSLPVSPRLQLSNGNRTLTLFNVTRNDTASYKCETQNPVSARRSDSVILNVLYGPDAPTISPLNTSYRSGENLNLSCHAASNPPAQYSWFVNGTFQQSTQELFIPNITVNNSGSYTCQAHNSDTGLNRTTVTTITVYAEPPKPFITSNNSNPVEDEDAVALTCEPEIQNTTYLWWVNNQSLPVSPRLQLSNDNRTLTLLSVTRNDVGPYECGIQNELSVDHSDPVILNVLYGPDDPTISPSYTYYRPGVNLSLSCHAASNPPAQYSWLIDGNIQQHTQELFISNITEKNSGLYTCQANNSASGHSRTTVKTITVSAELPKPSISSNNSKPVEDKDAVAFTCEPEAQNTTYLWWVNGQSLPVSPRLQLSNGNRTLTLFNVTRNDARAYVCGIQNSVSANRSDPVTLDVLYGPDTPIISPPDSSYLSGANLNLSCHSASNPSPQYSWRINGIPQQHTQVLFIAKITPNNNGTYACFVSNLATGRNNSIVKSITVSASGTSPGLSAGATVGIMIGVLVGVALI

SEQ ID NO: 4749 - protein, 158 aa, Homo Sapiens
ITSYVVDGQINIYGPAYTGRETVYSNASLLIQNVTREDAGSYTLHIIKRGDRTRGVTGYFTFNLYLKLPKPYITINNSKPRENKDVLAFTCEPKSENYTYIWWLNGQSLPVSPRVKQPIENRILILPSVTRNETGPYECEIRDRDGGMHSDPVTLNVL

SEQ ID NO: 4750 - protein, 419 aa, Homo Sapiens [sequence omitted]

SEQ ID NO: 4751 - protein, 261 aa, Homo Sapiens [sequence omitted]

SEQ ID NO: 4752 - protein, 1939 aa, Homo Sapiens
MTDAQMADFGAAAQYLRKSEKERLEAQTRPFDIRTECFVPDDKEEFVKAKILSREGGKVIAETENGKTVTVKEDQVLQQNPPKFDKIQDMAMLTFLHEPAVLFNLKERYAAWMIYTYSGLFCVTVNPYKWLPVYNAEVVAAYRGKKRSEAPPHIFSISDNAYQYMLTDRENQSILITGESGAGKTVNTKRVIQYFASIAAIGDRGKKDNANANKGTLEDQIIQANPALEAFGNAKTVRNDNSSRFGKFIRIHFGATGKLASADIETYLLEKSRVIFQLKAERNYHIFYQILSNKKPELLDMLLVTNNPYDYAFVSQGEVSVASIDDSEELMATDSAFDVLGFTSEEKAGVYKLTGAIMHYGNMKFKQKQREEQAEPDGTEDADKSAYLMGLNSADLLKGLCHPRVKVGNEYVTKGQSVQQVYYSIGALAKAVYEKMFNWMVTRINATLETKQPRQYFIGVLDIAGFEIFDFNSFEQLCINFTNEKLQQFFNHHMFVLEQEEYKKEGIEWTFIDFGMDLQACIDLIEKPMGIMSILEEECMFPKATDMTFKAKLYDNHLGKSNNFQKPRNIKGKQEAHFSLIHYAGTVDYNILGWLEKNKDPLNETVVALYQKSSLKLMATLFSSYATADTGDSGKSKGGKKKGSSFQTVSALHRENLNKLMTNLRTTHPHFVRCIIPNERKAPGVMDNPLVMHQLRCNGVLEGIRICRKGFPNRILYGDFRQRYRILNPVAIPEGQFIDSRKGTEKLLSSLDIDHNQYKFGHTKVFFKAGLLGLLEEMRDERLSRIITRMQAQARGQLMRIEFKKIVERRDALLVIQWNIRAFMGVKNWPWMKLYFKIKPLLKSAETEKEMATMKEEFGRIKETLEKSEARRKELEEKMVSLLQEKNDLQLQVQAEQDNLNDAEERCDQLIKNKIQLEAKVKEMNERLEDEEEMNAELTAKKRKLEDECSELKKDIDDLELTLAKVEKEKHATENKVKNLTEEMAGLDEIIAKLTKEKKALQEAHQQALDDLQVEEDKVNSLSKSKVKLEQQVDDLEGSLEQEKKVRMDLERAKRKLEGDLKLTQESIMDLENDKLQLEEKLKKKEFDINQQNSKIEDEQALALQLQKKLKENQARIEELEEELEAERTARAKVEKLRSDLSRELEEISERLEEAGGATSVQIEMNKKREAEFQKMRRDLEEATLQHEATAAALRKKHADSVAELGEQIDNLQRVKQKLEKEKSEFKLELDDVTSNMEQIIKAKANLEKVSRTLEDQANEYRVKLEEAQRSLNDFTTQRAKLQTENGELARQLEEKEALISQLTRGKLSYTQQMEDLKRQLEEEGKAKNALAHALQSARHDCDLLREQYEEETEAKAELQRVLSKANSEVAQWRTKYETDAIQRTEELEEAKKKLAQRLQDAEEAVEAVNAKCSSLEKTKHRLQNEIEDLMVDVERSNAAAAALDKKQRNFDKILAEWKQKYEESQSELESSQKEARSLSTELFKLKNAYEESLEHLETFKRENKNLQEEISDLTEQLGEGGKNVHELEKVRKQLEVEKLELQSALEEAEASLEHEEGKILRAQLEFNQIKAEIERKLAEKDEEMEQAKRNHQRVVDSLQTSLDAETRSRNEVLRVKKKMEGDLNEMEIQLSHANRMAAEAQKQVKSLQSLLKDTQIQLDDAVRANDDLKENIAIVERRNNLLQAELEELRAVVEQTERSRKLAEQELIETSERVQLLHSQNTSLINQKKKMESDLTQLQSEVEEAVQECRNAEEKAKKAITDAAMMAEELKKEQDTSAHLERMKKNMEQTIKDLQHRLDEAEQIALKGGKKQLQKLEARVRELEGELEAEQKRNAESVKGMRKSERRIKELTYQTEEDKKNLLRLQDLVDKLQLKVKAYKRQAEEAEEQANTNLSKFRKVQHELDEAEERADIAESQVNKLRAKSRDIGAKQKMHDEE

SEQ ID NO: 4753 - protein, 48 aa, Homo Sapiens
KIGDFGFSNEFTFGNKLDTFCGSPPYAAPELFQGKKYDGPEVDVWSCG

SEQ ID NO: 4754 - protein, 73 aa, Homo Sapiens
IHTGEKPHKCNECGKSFCRLSHLIQHQRTHSGEKPYECEECGKSFSRSSHLAQHQRTHTGEKPYECNECGRGF

SEQ ID NO: 4755 - protein, 237 aa, Homo Sapiens
AHMLQEDISSSYTTTTTITAPPPGVLQNGGDKLETMPLYLEDDIRPDIKDDIYDPTYKDKEGPSPKVEYVWRNIILMSLLHLGALYGITLIPTCKFYTWLWGVFYYFVSALGITAGAHRLWSHRSYKARLPLRLFLIIANTMAFQNDVYEWARDHRAHHKFSETHADPHNSRRGFFFSHVGWLLVRKHPAVKEKGSTLDLSDLEAEKLVMFQRRYYKPGLLMMCFILPTLVPWYCWG

SEQ ID NO: 4756 - protein, 109 aa, Homo Sapiens [sequence omitted]

SEQ ID NO: 4757 - protein, 216 aa, Homo Sapiens
LPDVGCVSVTVPAMLSHFISNDRSIPYKACLSELFFFHLLAGADCFLLTIMAYDRYLAICQSLTYSSRMSWGIQQALVGMSCVFSFTNALTQTVGLSPLNFCGPNVINHFYCDLPQVFQLSCSSTQLNELLLFAVGFIMAGTPLVLIITAYSHVAAAVLRIRSVEGRKKAFSTCGSHLTVVCLFFGRGIFNYMRLGSEEASDKDKGVGVFNTVINP

SEQ ID NO: 4758 - protein, 68 aa, Homo Sapiens
MRPKTGQVGCETPEELGPGPRQRWPLLLLGLAMVAHGLLRPMVAPQSGDPDPGASVGSSRSSLRSLWG

SEQ ID NO: 4759 - protein, 106 aa, Homo Sapiens
MPPCSCARSLCALQVLLLTVLGSSTNGQTKRNIGKRKCRDLFLAPVAASAIPVSGRKTGLVLLGLESAIITTNPSGGVTERGHFTFAGHSAGHFTKALQIIFTMAL

SEQ ID NO: 4760 - protein, 54 aa, Homo Sapiens
MEWNGMAWNRIKWNGINSSGMEWNGMEWNAVQCNRMEWNELELTGMEWNGMHLN

SEQ ID NO: 4761 - protein, 72 aa, Homo Sapiens
SATGMQGPAGSAGRRGVGARQCNPSLLPLASEAPSTCPGFTHGEAAPRPGLPLPLLLLHQLLLLFLSHLRRL

SEQ ID NO: 4762 - protein, 343 aa, Homo Sapiens [sequence omitted]

SEQ ID NO: 4763 - protein, 54 aa, Homo Sapiens
LQPIYWSRDDVAQWLKWAENEFSLRPIDSNTFEMNGKALLLLTKEDFRYRSPHS

SEQ ID NO: 4764 - protein, 419 aa, Homo Sapiens [sequence omitted]

SEQ ID NO: 4765 - protein, 240 aa, Homo Sapiens
MGPLSAPSCTHLITWKGVLLTASLLNFWNPPTTAEVTIEAQPPKVSEGKDVLLLVHNLPQNLPGYFWYKGEMTDLYHYIISYIVDGKIIIYGPAYSGRETVYSNASLLIQNVTRKDAGTYTLHIIKRGDETREEIRHFTFTLYYGPDLPRIYPSFTYYGSGENLDLSCFTESNPPAEYFWTINGKFQQSGQKLFIPQITRNHSGLYVCSVHNSATGKEISKSMTVKVSGPCHGDLTEFQS

SEQ ID NO: 4766 - protein, 344 aa, Homo Sapiens; identical to SEQ ID NO: 4745

SEQ ID NO: 4767 - protein, 437 aa, Homo Sapiens
MSWSLHPRNLILYFYALLFLSSTCVAYVATRDNCCILDERFGSYCPTTCGIADFLSTYQTKVDKDLQSLEDILHQVENKTSEVKQLIKAIQLTYNPDESSKPNMIDAATLKSRIMLEEIMKYEASILTHDSSIRYLQEIYNSNNQKIVNLKEKVAQLEAQCQEPCKDTVQIHDITGKDCQDIANKGAKQSGLYFIKPLKANQQFLVYCEIDGSGNGWTVFQKRLDGSVDFKKNWIQYKEGFGHLSPTGTTEFWLGNEKIHLISTQSAIPYALRVELEDWNGRTSTADYAMFKVGPEADKYRLTYAYFAGGDAGDAFDGFDFGDDPSDKFFTSHNGMQFSTWDNDNDKFEGNCAEQDGSGWWMNKCHAGHLNGVYYQGGTYSKASTPNGYDNGIIWATWKTRWYSMKKTTMKIIPFNRLTIGEGQQHHLGGAKQAGDV

SEQ ID NO: 4768 - protein, 26926 aa, Homo Sapiens
MTTQAPTFTQPLQSVVVLEGSTATFEAHISGFPVPEVSWFRDGQVISTSTLPGVQISFSDGRAKLTIPAVTKANSGRYSLKATNGSGQATSTAELLVKAETAPPNFVQRLQSMTVRQGSQVRLQVRVTGIPNPVVKFYRDGAEIQSSLDFQISQEGDLYSLLIAEAYPEDSGTYSVNATNSVGRATSTAELLVQGEEEVPAKKTKTIVSTAQISESRQTRIEKKIEAHFDARSIATVEMVIDGAAGQQLPHKTPPRIPPKPKSRSPTPPSIAAKAQLARQQSPSPIRHSPSPVRHVRAPTPSPVRSVSPAARISTSPIRSVRSPLLMRKTQASTVATGPEVPPPWKQEGYVASSSEAEMRETTLTTSTQIRTEERWEGRYGVQEQVTISGAAGAAASVSASASYAAEAVATGAKEVKQDADKSAAVATVVAAVDMARVREPVISAVEQTAQRTTTTAVHIQPAQEQVRKEAEKTAVTKVVVAADKAKEQELKSRTKEIITTKQEQMHVTHEQIRKETEKTFVPKVVISAAKAKEQETRISEEITKKQKQVTQEAIMKETRKTVVPKVIVATPKVKEQDLVSRGREGITTKREQVQITQEKMRKEAEKTALSTIAVATAKAKEQETILRTRETMATRQEQIQVTHGKVDVGKKAEAVATVVAAVDQARVREPREPGHLEESYAQQTTLEYGYKERISAAKVAEPPQRPASEPHVVPKAVKPRVIQAPSETHIKTTDQKGMHISSQIKKTTDLTTERLVHVDKRPRTASPHFTVSKISVPKTEHGYEASIAGSAIATLQKELSATSSAQKITKSVKAPTVKPSETRVRAEPTPLPQFPFADTPDTYKSEAGVEVKKEVGVSITGTTVREERFEVLHGREAKVTETARVPAPVEIPVTPPTLVSGLKNVTVIEGESVTLECHISGYPSPTVTWYREDYQIESSIDFQITFQSGIARLMIREAFAEDSGRFTCSAVNEAGTVSTSCYLAVQVSEEFEKETTAVTEKFTTEEKRFVESRDVVMTDTSLTEEQAGPGEPAAPYFITKPVVQKLVEGGSVVFGCQVGGNPKPHVYWKKSGVPLTTGYRYKVSYNKQTGECKLVISMTFADDAGEYTIVVRNKHGETSASASLLEEADYELLMKSQQEMLYQTQVTAFVQEPEVGETAPGFVYSEYEKEYEKEQALIRKKMAKDTVVVRTYVEDQEFHISSFEERLIKEIEYRIIKTTLEELLEEDGEEKMAVDISESEAVESGFDLRIKNYRILEGMGVTFHCKMSGYPLPKIAWYKDGKRIKHGERYQMDFLQDGRASLRIPVVLPEDEGIYTAFASNIKGNAICSGKLYVEPAAPLGAPTYIPTLEPVSRIRSLSPRSVSRSPIRMSPARMSPARMSPARMSPARMSPGRRLEETDESQLERLYKPVFVLKPVSFKCLEGANCRFDLKVVGRPMPETFWFHDGQQIVNDYTHKVVIKEDGTQSLIIVPATPSDSGEWTVVAQNRAGRSSISVILTVEAVEHQVKPMFVEKLKNVNIKEGSRLEMKVRATGNPNPDIVWLKNSDIIVPHKYPKIRIEGTKGEAALKIDSTVSQDSAWYTATAINKAGRDTTRCKVNVEVEFAEPEPERKLIIPRGTYRAKEIAAPELEPLHLRYGQEQWEEGDLYDKEKQQKPFFKKKLTSLRLKRFGPAHFECRLTPISDPTMVVEWLHDGKPLEAANRLRMINEFGYCSLDYGVAYSRDSGIITCRATNKYGTDHTSATLIVKDEKSLVEESQLPEGRKGLQRIEELERMAHEGALTGVTTDQKEKQKPDIVLYPEPVRVLEGETARFRCRVTGYPQPKVNWYLNGQLIRKSKRFRVRYDGIHYLDIVDCKSYDTGEVKVTAENPEGVIEHKVKLEIQQREDFRSVLRRAPEPRPEFHVHEPGKLQFEVQKVDRPVDTTETKEVVKLKRAERITHEKVPEESEELRSKFKRRTEEGYYEAITAVELKSRKKDESYEELLRKTKDELLHWTKELTEEEKKALAEEGKITIPTFKPDKIELSPSMEAPKIFERIQSQTVGQGSDAHFRVRVVGKPDPECEWYKNGVKIERSDRIYWYWPEDNVCELVIRDVTAEDSASIMVKAINIAGETSSHAFLLVQAKQLITFTQELQDVVAKEKDTMATFECETSEPFVKVKWYKDGMEVHEGDKYRMHSDRKVHFLSILTIDTSDAEDYSCVLVEDENVKTTAKLIVEGAVVEFVKELQDIEVPESYSGELECIVSPENIEGKWYHNDVELKSNGKYTITSRRGRQNLTVKDVTKEDQGEYSFVIDGKKTTCKLKMKPRPIAILQGLSDQKVCEGDIVQLEVKVSLESVEGVWMKDGQEVQPSDRVHIVIDKQSHMLLIEDMTKEDAGNYSFTIPALGLSTSGRVSVYSVDVITPLKDVNVIEGTKAVLECKVSVPDVTSVKWYLNDEQIKPDDRVQAIVKGTKQRLVINRTHASDEGPYKLIVGRVETNCNLSVEKIKIIRGLRDLTCTETQNVVFEVELSHSGIDVLWNFKDKEIKPSSKYKIEAHGKIYKLTVLNMMKDDEGKYTFYAGENMTSGKLTVAGGAISKPLTDQTVAESQEAVFECEVANPDSKGEWLRDGKHLPLTNNIRSESDGHKRRLIIAATKLDDIGEYTYKVATSKTSAKLKVEAVKIKKTLKNLTVTETQDAVFTVELTHPNVKGVQWIKNGVVLESNEKYAISVKGTIYSLRIKNCAIVDESVYGFRLGRLGASARLHVETVKIIKKPKDVTALENATVAFEVSVSHDTVPVKWFHKSVEIKPSDKHRLVSERKVHKLMLQNISPSDAGEYTAVVGQLECKAKLFVETLHITKTMKNIEVPETKTASFECEVSHFNVPSMWLKNGVEIEMSEKFKIVVQGKLHQLIIMNTSTEDSAEYTFVCGNDQVSATLTVTPIMITSMLKDINAEEKDTITFEVTVNYEGISYKWLKNGVEIKSTDKCQMRTKKLTHSLNIRNVHFGDAADYTFVAGKATSTATLYVEARHIEFRKHIKDIKVLEKKRAMFECEVSEPDITVQWMKDDQELQITDRIKIQKEKYVHRLLIPSTRMSDAGKYTVVAGGNVSTAKLFVEGRDVRIRSIKKEVQVIEKQRAVVEFEVNEDDVDAHWYKDGIEINFQVQERHKYVVERRIHRMFISETRQSDAGEYTFVAGRNRSSVTLYVNAPEPPQVLQELQPVTVQSGKPARFCAMISGRPQPKISWYKEEQLLSTGFKCKFLHDGQEYTLLLIEAFPEDAAVYTCEAKNDYGVATTSASLSVEVPEVVSPDQEMPVYPPAIITPLQDTVTSEGQPARFQCRVSGTDLKVSWYSKDKKIKPSRFFRMTQFEDTYQLEIAEAYPEDEGTYTFVANNAVGQVSSTANLSLEAPESILHERIEQEIEMEMKEFSSSFLSAEEEGLHSAELQLSKINETLELLSESPVYPTKFDSEKEGTGPIFIKEVSNADISMGDVATLSVTVIGIPKPKIQWFFNGVLLTPSADYKFVFDGDDHSLIILFTKLEDEGEYTCMASNDYGKTICSAYLKINSKGEGHKDTETESAVAKSLEKLGGPCPPHFLKELKPIRCAQGLPAIFEYTVVGEPAPTVTWFKENKQLCTSVYYTIIHNPNGSGTFIVNDPQREDSGLYICKAENMLGESTCAAELLVLLEDTDMTDTPCKAKSTPEAPEDFPQTPLKGPAVEALDSEQEIATFVKDTILKAALITEENQQLSYEHIAKANELSSQLPLGAQELQSILEQDKLTPESTREFLCINGSIHFQPLKEPSPNLQLQIVQSQKTFSKEGILMPEEPETQAVLSDTEKIFPSAMSIEQINSLTVEPLKTLLAEPEGNYPQSSIEPPMHSYLTSVAEEVLSLKEKTVSDTNREQRVTLQKQEAQSALILSQSLAEGHVESLQSPDVMISQVNYEPLVPSEHSCTEGGKILIESANPLENAGQDSAVRIEEGKSLRFPLALEEKQVLLKEEHSDNVVMPPDQIIESKREPVAIKKVQEVQGRDLLSKESLLSGIPEEQRLNLKIQICRALQAAVASEQPGLFSEWLRNIEKVEVEAVNITQEPRHIMCMYLVTSAKSVTEEVTIIIEDVDPQMANLKMELRDALCAIIYEEIDILTAEGPRIQQGAKTSLQEEMDSFSGSQKVEPITEPEVESKYLISTEEVSYFNVQSRVKYLDATPVTKGVASAVVSDEKQDESLKPSEEKEESSSESGTEEVATVKIQEAEGGLIKEDGPMIHTPLVDTVSEEGDIVHLTTSITNAKEVNWYFENKLVPSDEKFKCLQDQNTYTLVIDKVNTEDHQGEYVCEALNDSGKTATSAKLTVVKRAAPVIKRKIEPLEVALGHLAKFTCEIQSAPNVRFQWFKAGREIYESDKCSIRSSKYISSLEILRTQVVDCGEYTCKASNEYGSVSCTATLTVTVPGGEKKVRKLLPERKPEPKEEVVLKSVLRKRPEEEEPKVEPKKLEKVKKPAVPEPPPPKPVEEVEVPTVTKRERKIPEPTKVPEIKPAIPLPAPEPKPKPEAEVKTIKPPPVEPEPTPIAAPVTVPVVGKKAEAKAPKEEAAKPKGPIKGVPKKTPSPIEAERRKLRPGSGGEKPPDEAPFTYQLKAVPLKFVKEIKDIILTESEFVGSSAIFECLVSPSTAITTWMKDGSNIRESPKHRFIADGKDRKLHIIDVQLSDAGEYTCVLRLGNKEKTSTAKLVVEELPVRFVKTLEEEVTVVKGQPLYLSCELNKERDVVWRKDGKIVVEKPGRIVPGVIGLMRALTINDADDTDAGTYTVTVENANNLECSSCVKVVEVIRDWLVKPIRDQHVKPKGTAIFACDIAKDTPNIKWFKGYDEIPAEPNDKTEILRDGNHLYLKIKNAMPEDIAEYAVEIEGKRYPAKLTLGEREVELLKPIEDVTIYEKESASFDAEISEADIPGQWKLKGELLRPSPTCEIKAEGGKRFLTLHKVKLDQAGEVLYQALNAITTAILTVKEIELDFAVPLKDVTVPERRQARFECVLTREANVIWSKGPDIIKSSDKFDIIADGKKHILVINDSQFDDEGVYTAEVEGKKTSARLFVTGIRLKFMSPLEDQTVKEGETATFVCELSHEKMHVVWFKNDAKLHTSRTVLISSEGKTHKLEMKEVTLDDISQIKAQVKELSSTAQLKVLEADPYFTVKLHDKTAVEKDEITLKCEVSKDVPVKWFKDGEEIVPSPKYSIKADGLRRILKIKKADLKDKGEYVCDCGTDKTKANVTVEARLIEVEKPLYGVEVFVGETAHFEIELSEPDVHGQWKLKGQPLTASPDCEIIEDGKKHILILHNCQLGMTGEVSFQAANAKSAANLKVKELPLIFITPLSDVKVFEKDEAKFECEVSREPKTFRWLKGTQEITGDDRFELIKDGTKHSMVIKSAAFEDEAKYMFEAEDKHTSGKLIIEGIRLKFLTPLKDVTAKEKESAVFTVELSHDNIRVKWFKNDQRLHTTRSVSMQDEGKTHSITFKDLSIDDTSQIRVEAMGMSSEAKLTVLEGDPYFTGKLQDYTGVEKDEVILQCEISKADAPVKWFKDGKEIKPSKNAVIKTDGKKRMLILKKALKSDIGQYTCDCGTDKTSGKLDIEDREIKLVRPLHSVEVMETETARFETEISEDDIHANWKLKGEALLQTPDCEIKEEGKIHSLVLHNCRLDQTGGVDFQAANVKSSAHLRVKPRVIGLLRPLKDVTVTAGETATFDCELSYEDIPVEWYLKGKKLEPSDKVVPRSEGKVHTLTLRDVKLEDAGEVQLTAKDFKTHANLFVKEPPVEFTKPLEDQTVEEGATAVLECEVSRENAKVKWFKNGTEILKSKKYEIVADGRVRKLVIHDCTPEDIKTYTCDAKDFKTSCNLNVVPPHVEFLRPLTDLQVREKEMARFECELSRENAKVKWFKDGAEIKKGKKYDIISKGAVRILVINKCLLDDEAEYSCEVRTARTSGMLTVLEEEAVFTKNLANIEVSETDTIKLVCEVSKPGAEVIWYKGDEEIIETGRYEILTEGRKRILVIQNAHLEDAGNYNCRLPSSRTDGKVKVHELAAEFISKPQNLEILEGEKAEFVCSISKESFPVQWKRDDKTLESGDKYDVIADGKKRVLVVKDATLQDMGTYVVMVGAARAAAHLTVIEKLRIVVPLKDTRVKEQQEVVFNCEVNTEGAKAKWFRNEEAIFDSSKYIILQKDLVYTLRIRDAHLDDQANYNVSLTNHRGENVKSAANLIVEEEDLRIVEPLKDIETMEKKSVTFWCKVNRLNVTLKWTKNGEEVPFDNRVSYRVDKYKHMLTIKDCGFPDEGEYIVTAGQDKSVAELLIIEAPTEFVEHLEDQTVTEFDDAVFSCQLSREKANVKWYRNGREIKEGKKYKFEKDGSIHRLIIKDCRLDDECEYACGVEDRKSRARLFVEEIPVEIIRPPQDILEAPGADVVFLAELNKDKVEVQWLRNNMVVVQGDKHQMMSEGKIHRLQICDIKPRDQGEYRFIAKDKEARAKLELAAAPKIKTADQDLVVDVGKPLTMVVPYDAYPKAEAEWFKENEPLSTKTIDTTAEQTSFRILEAKKGDKGRYKIVLQNKHGKAEGFINLKVIDVPGPVRNLEVTETFDGEVSLAWEEPLTDGGSKIIGYVVERRDIKRKTWVLATDRAESCEFTVTGLQKGGVEYLFRVSARNRVGTGEPVETDNPVEARSKYDVPGPPLNVTITDVNRFGVSLTWEPPEYDGGAEITNYVIELRDKTSIRWDTAMTVRAEDLSATVTDVVEGQEYSFRVRAQNRIGVGKPSAATPFVKVADPIERPSPPVNLTSSDQTQSSVQLKWEPPLKDGGSPILGYIIERCEEGKDNWIRCNMKLVPELTYKVTGLEKGNKYLYRVSAENKAGVSDPSEILGPLTADDAFVEPTMDLSAFKDGLEVIVPNPITILVPSTGYPRPTATWCFGDKVLETGDRVKMKTLSAYAELVISPSERSDKGIYTLKLENRVKTISGEIDVNVIARPSAPKELKFGDITKDSVHLTWEPPDDDGGSPLTGYVVEKREVSRKTWTKVMDFVTDLEFTVPDLVQGKEYLFKVCARNKCGPGEPAYVDEPVNMSTPATVPDPPENVKWRDRTANSIFLTWDPPKNDGGSRIKGYIVERCPRGSDKWVACGEPVAETKMEVTGLEEGKWYAYRVKTLNRQGASKPSRPTEEIQAVDTQEAPEIFLDVKLLAGLTVKAGTKIELPATVTGKPEPKITWTKADMILKQDKRITIENVPKKSTVTIVDSKRSDTGTYIIEAVNVCGRATAVVEVNVLDKPGPPAAFDITDVTNESCLLTWNPPRDDGGSKITNYVVERRATDSEVWHKLSSTVKDTNFKATKLIPNKEYIFRVAAENMYGAGEPVQASPITAKYQFDPPGPPTRLEPSDITKDAVTLTWCEPDDDGGSPITGYWVERLDPDTDKWVRCNKMPVKDTTYRVKGLTNKKKYRFRVLAENLAGPGKPSKSTEPILIKDPIDPPWPPGKPTVKDVGKTSVRLNWTKPEHDGGAKIESYVIEMLKTGTDEWVRVAEGVPTTQHLLPGLMEGQEYSFRVRAVNKAGESEPSEPSDPVLCREKLYPPSPPRWLEVINITKNTADLKWTVPEKDGGSPITNYIVEKRDVRRKGWQTVDTTVKDTKCTVTPLTEGSLYVFRVAAENAIGQSDYTEIEDSVLAKDTFTTPGPPYALAVVDVTKRHVDLKWEPPKNDGGRPIQRYVIEKKERLGTRWVKAGKTAGPDCNFRVTDVIEGTEVQFQVRAENEAGVGHPSEPTEILSIEDPTSPPSPPLDLHVTDAGRKHIAIAWKPPEKNGGSPIIGYHVEMCPVGTEKWMRVNSRPIKDLKFKVEEGVVPDKEYVLRVRAVNAIGVSEPSEISENVVAKDPDCKPTIDLETHDIIVIEGEKLSIPVPFRAVPVPTVSWHKDGKEVKASDRLTMKNDHISAHLEVPKSVRADAGIYTITLENKLGSATASINVKVIGLPGPCKDIKASDITKSSCKLTWEPPEFDGGTPILHYVLERREAGRRTYIPVMSGENKLSWTVKDLIPNGEYFFRVKAVNKVGGGEYIELKNPVIAQDPKQPPDPPVDVEVHNPTAEAMTITWKPPLYDGGSKIMGYIIEKIAKGEERWKRCNEHLVPILTYTAKGLEEGKEYQFRVRAENAAGISEPSRATPPTKAVDPIDAPKVILRTSLEVKRGDEIALDASISGSPYPTITWIKDENVIVPEEIKKRAAPLVRRRKGEVQEEEPFVLPLTQRLSIDNSKKGESQLRVRDSLRPDHGLYMIKVENDHGIAKAPCTVSVLDTPGPPINFVFEDIRKTSVLCKWEPPLDDGGSEIINYTLEKKDKTKPDSEWIVVTSTLRHCKYSVTKLIEGKEYLFRVRAENRFGPGPPCVSKPLVAKDPFGPPDAPDKPIVEDVTSNSMLVKWNEPKDNGSPILGYWLEKREVNSTHWSRVNKSLLNALKANVDGLLEGLTYVFRVCAENAAGPGKFSPPSDPKTAHDPISPPGPPIPRVTDTSSTTIELEWEPPAFNGGGEIVGYFVDKQLVGTNKWSRCTEKMIKVRQYTVKEIREGADYKLRVSAVNAAGEGPPGETQPVTVAEPQEPPAVELDVSVKGGIQIMAGKTLRIPAVVTGRPVPTKVWTKEEGELDKDRVVIDNVGTKSELIIKDALRKDHGRYVITATNSCGSKFAAARVEVFDVPGPVLDLKPVVTNRKMCLLNWSDPEDDGGSEITGFIIERKDAKMHTWRQPIETERSKCDITGLLEGQEYKFRVIAKNKFGCGPPVEIGPILAVDPLGPPTSPERLTYTERQRSTITLDWKEPRSNGGSPIQGYIIEKRRHDKPDFERVNKRLCPTTSFLVENLDEHQMYEFRVKAVNEIGESEPSLPLNVVIQDDEVPPTIKLRLSVRGDTIKVKAGEPVHIPADVTGLPMPKIEWSKNETVIEKPTDALQITKEEVSRSEAKTELSIPKAVREDKGTYTVTASNRLGSVFRNVHVEVYDRPSPPRNLAVTDIKAESCYLTWDAPLDNGGSEITHYVIDKRDASRKKAEWEEVTNTAVEKRYGIWKLIPNGQYEFRVRAVNKYGISDECKSDKVVIQDPYRLPGPPGKPKVLARTKGSMLVSWTPPLDNGGSPITGYWLEKREEGSPYWSRVSRAPITKVGLKGVEFNVPRLLEGVKYQFRAMAINAAGIGPPSEPSDPEVAGDPIFPPGPPSCPEVKDKTKSSISLGWKPPAKDGGSPIKGYIVEMQEEGTTDWKRVNEPDKLITTCECVVPNLKELRKYRFRVKAVNEAGESEPSDTTGEIPATDIQEEPEVFIDIGAQDCLVCKAGSQIRIPAVIKGRPTPKSSWEFDGKAKKAMKDGVHDIPEDAQLETAENSSVIIIPECKRSHTGKYSITAKNKAGQKTANCRVKVMDVPGPPKDLKVSDITRGSCRLSWKMPDDDGGDRIKGYVIEKRTIDGKAWTKVNPDCGSTTFVVPDLLSEQQYFFRVRAENRFGIGPPVETIQRTTARDPIYPPDPPIKLKIGLITKNTVHLSWKPPKNDGGSPVTHYIVECLAWDPTGTKKEAWRQCNKRDVEELQFTVEDLVEGGEYEFRVKAVNAAGVSKPSATVGPCDCQRPDMPPSIDLKEFMEVEEGTNVNIVAKIKGVPFPTLTWFKAPPKKPDNKEPVLYDTHVNKLVVDDTCTLVIPQSRRSDTGLYTITAVNNLGTASKEMRLNVLGRPGPPVGPIKFESVSADQMTLSWFPPKDDGGSKITNYVIEKREANRKTWVHVSSEPKECTYTIPKLLEGHEYVFRIMAQNKYGIGEPLDSEPETARNLFSVPGAPDKPTVSSVTRNSMTVNWEEPEYDGGSPVTGYWLEMKDTTSKRWKRVNRDPIKAMTLGVSYKVTGLIEGSDYQFRVYAINAAGVGPASLPSDPATARDPIAPPGPPFPKVTDWTKSSADLEWSPPLKDGGSKVTGYIVEYKEEGKEEWEKGKDKEVRGTKLVVTGLKEGAFYKFRVSAVNIAGIGEPGEVTDVIEMKDRLVSPDLQLDASVRDRIVVHAGGVIRIIAYVSGKPPPTVTWNMNERTLPQEATIETTAISSSMVIKNCQRSHQGVYSLLAKNEAGERKKTIIVDVLDVPGPVGTPFLAHNLTNESCKLTWFSPEDDGGSPITNYVIEKRESDRRAWTPVTYTVTRQNATVQGLIQGKAYFFRIAAENSIGMGPFVETSEALVIREPITVPERPEDLEVKEVTKNTVTLTWNPPKYDGGSEIINYVLESRLIGTEKFHKVTNDNLLSRKYTVKGLKEGDTYEYRVSAVNIVGQGKPSFCTKPITCKDELAPPTLHLDFRDKLTIRVGEAFALTGRYSGKPKPKVSWFKDEADVLEDDRTHIKTTPATLALEKIKAKRSDSGKYCVVVENSTGSRKGFCQVNVVDHPGPPVGPVSFDEVTKDYMVISWKPPLDDGGSKITNYIIEKKEVGKDVWMPVTSASAKTTCKVSKLLEGKDYIFRIHAENLYGISDPLVSDSMKAKDRFRVPDAPDQPIVTEVTKDSALVTWNKPHDGGKPITNYILEKRETMSKRWARVTKDPIHPYTKFRVPDLLEGCQYEFRVSAENEIGIGDPSPPSKPVFAKDPIAKPSPPVNPEAIDTTCNSVDLTWQPPRHDGGSKILGYIVEYQKVGDEEWRRANHTPESCPETKYKVTGLRDGQTYKFRVLAVNAAGESDPAHVPEPVLVKDRLEPPELILDANMAREQHIKVGDTLRLSAIIKGVPFPKVTWKKEDRDAPTKARIDVTPVGSKLEIRNAAHEDGGIYSLTVENPAGSKTVSVKVLVLDKPGPPRDLEVSEIRKDSCYLTWKEPLDDGGSVITNYVVERRDVASAQWSPLSATSKKKSHFAKHLNEGNQYLFRVAAENQYGRGPFVETPKPIKALDPLHPPGPPKDLHHVDVDKTEVSLVWNKPDRDGGSPITGYLVEYQEEGTQDWIKFKTVTNLECVVTGLQQGKTYRFRVKAENIVGLGLPDTTIPIECQEKLVPPSVELDVKLIEGLVVKAGTTVRFPAIIRGVPVPTAKWTTDGSEIKTDEHYTVETDNFSSVLTIKNCLRRDTGEYQITVSNAAGSKTVAVHLTVLDVPGPPTGPINILDVTPEHMTISWQPPKDDGGSPVINYIVEKQDTRKDTWGVVSSGSSKTKLKIPHLQKGCEYVFRVRAENKIGVGPPLDSTPTVAKHKFSPPSPPGKPVVTDITENAATVSWTLPKSDGGSPITGYYMERREVTGKWVRVNKTPIADLKFRVTGLYEGNTYEFRVFAENLAGLSKPSPSSDPIKACRPIKPPGPPINPKLKDKSRETADLVWTKPLSDGGSPILGYVVECQKPGTAQWNRINKDELIRQCAFRVPGLIEGNEYRFRIKAANIVGEGEPRELAESVIAKDILHPPEVELDVTCRDVITVRVGQTIRILARVKGRPEPDITWTKEGKVLVREKRVDLIQDLPRVELQIKEAVRADHGKYIISAKNSSGHAQGSAIVNVLDRPGPCQNLKVTNVTKENCTISWENPLDNGGSEITNFIVEYRKPNQKGWSIVASDVTKRLIKANLLANNEYYFRVCAENKVGVGPTIETKTPILAINPIDRPGEPENLHIADKGKTFVYLKWRRPDYDGGSPNLSYHVERRLKGSDDWERVHKGSIKETHYMVDRCVENQIYEFRVQTKNEGGESDWVKTEEVVVKEDLQKPVLDLKLSGVLTVKAGDTIRLEAGVRGKPFPEVAWTKDKDATDLTRSPRVKIDTRADSSKFSLTKAKRSDGGKYVVTATNTAGSFVAYATVNVLDKPGPVRNLKIVDVSSDRCTVCWDPPEDDGGCEIQNYILEKCETKRMVWSTYSATVLTPGTTVTRLIEGNEYIFRVRAENKIGTGPPTESKPVIAKTKYDKPGRPDPPEVTKVSKEEMTVVWNPPEYDGGKSITGYFLEKKEKHSTRWVPVNKSAIPERRMKVQNLLPDHEYQFRVKAENEIGIGEPSLPSRPVVAKDPIEPPGPPTNFRVVDTTKHSITLGWGKPVYDGGAPIIGYVVEMRPKIADASPDEGWKRCNAAAQLVRKEFTVTSLDENQEYEFRVCAQNQVGIGRPAELKEAIKPKEILEPPEIDLDASMRKLVIVRAGCPIRLFAIVRGRPAPKVTWRKVGIDNVVRKGQVDLVDTMAFLVIPNSTRDDSGKYSLTLVNPAGEKAVFVNVRVLDTPGPVSDLKVSDVTKTSCHVSWAPPENDGGSQVTHYIVEKREADRKTWSTVTPEVKKTSFHVTNLVPGNEYYFRVTAVNEYGPGVPTDVPKPVLASDPLSEPDPPRKLEATEMTKNSATLAWLPPLRDGGAKIDGYIISYREEEQPADRWTEYSVVKDLSLVVTGLKEGKKYKFRVAARNAVGVSLPREAEGVYEAKEQLLPPKILMPEQITIKAGKKLRIEAHVYGKPHPTCKWKKGEDEVVTSSHLAVHKADSSSILIIKDVTRKDSGYYSLTAENSSGTDTQKIKVVVMDAPGPPQPPFDISDIDADACSLSWHIPLEDGGSNITNYIVEKCDVSRGDWVTALASVTKTSCRVGKLIPGQEYIFRVRAENRFGISEPLTSPKMVAQFPFGVPSEPKNARVTKVNKDCIFVAWDRPDSDGGSPIIGYLIERKERNSLLWVKANDTLVRSTEYPCAGLVEGLEYSFRIYALNKAGSSPPSKPTEYVTARMPVDPPGKPEVIDVTKSTVSLIWARPKHDGGSKIIGYFVEACKLPGDKWVRCNTAPHQIPQEEYTATGLEEKAQYQFRAIARTAVNISPPSEPSDPVTILAENVPPRIDLSVAMKSLLTVKAGTNVCLDATVFGKPMPTVSWKKDGTLLKPAEGIKMAMQRNLCTLELFSVNRKDSGDYTITAENSSGSKSATIKLKVLDKPGPPASVKINKMYSDRAMLSWEPPLEDGGSEITNYIVDKRETSRPNWAQVSATVPITSCSVEKLIEGHEYQFRICAENKYGVGDPVFTEPAIAKNPYDPPGRCDPPVISNITKDHMTVSWKPPADDGGSPITGYLLEKRETQAVNWTKVNRKPIIERTLKATGLQEGTEYEFRVTAINKAGPGKPSDASKAAYARDPQYPPAPPAFPKVYDTTRSSVSLSWGKPAYDGGSPIIGYLVEVKRADSDNWVRCNLPQNLQKTRFEVTGLMEDTQYQFRVYAVNKIGYSDPSDVPDKHYPKDILIPPEGEHDADLRKTLILRAGVTMRLYVPVKGRPPPKITWSKPNVNLRDRIGLDIKSTDFDTFLRCENVNKYDAGKYILTLENSCGKKEYTIVVKVLDTPGPPINVTVKEISKDSAYVTWEPPIIDGGSPIINYVVQKRDAERKSWSTVTTECSKTSFRVPNLEEGKSYFFRVFAENEYGIGDPGETRDAVKASQTPGPVVDLKVRSVSKSSCSIGWKKPHSDGGSRIIGYVVDFLTEENKWQRVMKSLSLQYSAKDLTEGKEYTFRVSAENENGEGTPSEITVVARDDVVAPDLDLKGLPDLCYLAKENSNFRLKIPIKGKPAPSVSWKKGEDPLATDTRVSVESSAVNTTLIVYDCQKSDAGKYTITLKNVAGTKEGTISIKVVGKPGIPTGPIKFDEVTAEAMTLKWAPPKDDGGSEITNYILEKRDSVNNKWVTCASAVQKTTFRVTRLHEGMEYTFRVSAENKYGVGEGLKSEPIVARHPFDVPDAPPPPNIVDVRHDSVSLTWTDPKKTGGSPITGYHLEFKERNSLLWKRANKTPIRMRDFKVTGLTEGLEYEFRVMAINLAGVGKPSLPSEPVVALDPIDPPGKPEVINITRNSVTLIWTEPKYDGGHKLTGYIVEKRDLPSKSWMKANHVNVPECAFTVTDLVEGGKYEFRIRAKNTAGAISAPSESTETIICKDEYEAPTIVLDPTIKDGLTIKAGDTIVLNAISILGKPLPKSSWSKAGKDIRPSDITQITSTPTSSMLTIKYATRKDAGEYTITATNPFGTKVEHVKVTVLDVPGPPGPVEISNVSAEKATLTWTPPLEDGGSPIKSYILEKRETSRLLWTVVSEDIQSCRHVATKLIQGNEYIFRVSAVNHYGKGEPVQSEPVKMVDRFGPPGPPEKPEVSNVTKNTATVSWKRPVDDGGSEITGYHVERREKKSLRWVRAIKTPVSDLRCKVTGLQEGSTYEFRVSAENRAGIGPPSEASDSVLMKDAAYPPGPPSNPHVTDTTKKSASLAWGKPHYDGGLEITGYVVEHQKVGDEAWIKDTTGTALRITQFVVPDLQTKEKYNFRISAINDAGVGEPAVIPDVEIVEREMAPDFELDAELRRTLVVRAGLSIRIFVPIKGRPAPEVTWTKDNINLKNRANIENTESFTLLIIPECNRYDTGKFVMTIENPAGKKSGFVNVRVLDTPGPVLNLRPTDITKDSVTLHWDLPLIDGGSRITNYIVEKREATRKSYSTATTKCHKCTYKVTGLSEGCEYFFRVMAENEYGIGEPTETTEPVKASEAPSPPDSLNIMDITKSTVSLAWPKPKHDGGSKITGYVIEAQRKGSDQWTHITTVKGLECVVRNLTEGEEYTFQVMAVNSAGRSAPRESRPVIVKEQTMLPELDLRGIYQKLVIAKAGDNIKVEIPVLGRPKPTVTWKKGDQILKQTQRVNFETTATSTILNINECVRSDSGPYPLTARNIVGEVGDVITIQVHDIPGPPTGPIKFDEVSSDFVTFSWDPPENDGGVPISNYVVEMRQTDSTTWVELATTVIRTTYKATRLTTGLEYQFRVKAQNRYGVGPGITSAWIVANYPFKVPGPPGTPQVTAVTKDSMTISWHEPLSDGGSPILGYHVERKERNGILWQTVSKALVPGNIFKSSGLTDGIAYEFRVIAENMAGKSKPSKPSEPMLALDPIDPPGKPVPLNITRHTVTLKWAKPEYTGGFKITSYIVEKRDLPNGRWLKANFSNILENEFTVSGLTEDAAYEFRVIAKNAAGAISPPSEPSDAITCRDDVEAPKIKVDVKFKDTVILKAGEAFRLEADVSGRPPPTMEWSKDGKELEGTAKLEIKIADFSTNLVNKDSTRRDSGAYTLTATNPGGFAKHIFNVKVLDRPGPPEGPLAVTEVTSEKCVLSWFPPLDDGGAKIDHYIVQKRETSRLAWTNVASEVQVTKLKVTKLLKGNEYIFRVMAVNKYGVGEPLESEPVLAVNPYGPPDPPKNPEVTTITKDSMVVCWGHPDSDGGSEIINYIVERRDKAGQRWIKCNKKTLTDLRYKVSGLTEGHEYEFRIMAENAAGISAPSPTSPFYKACDTVFKPGPPGNPRVLDTSRSSISIAWNKPIYDGGSEITGYMVEIALPEEDEWQIVTPPAGLKATSYTITGLTENQEYKIRIYAMNSEGLGEPALVPGTPKAEDRMLPPEIELDADLRKVVTIRACCTLRLFVPIKGRPDPEVKWARDHGESLDKASIESASSYTLLIVGNVNRFDSGKYILTVENSSGSKSAFVNVRVLDTPGPPQDLKVKEVTKTSVTLTWDPPLLDGGSKIKNYIVEKRESTRKAYSTVATNCHKTSWKVDQLQEGCSYYFRVLAENEYGIGLPAETAESVKASERPLPPGKITLMDVTRNSVSLSWEKPEHDGGSRILGYIVEMQTKGSDKWATCATVKVTEATITGLIQGEEYSFRVSAQNEKGISDPRQLSVPVIAKDLVIPPAFKLLFNTFTVLAGEDLKVDVPFIGRPTPAVTWHKDNVPLKQTTRVNAESTENNSLLTIKDACREDVGHYVVKLTNSAGEAIETLNVIVLDKPGPPTGPVKMDEVTADSITLSWGPPKYDGGSSINNYIVEKRDTSTTTWQIVSATVARTTIKACRLKTGCEYQFRIAAENRYGKSTYLNSEPTVAQYPFKVPGPPGTPVVTLSSRDSMEVQWNEPISDGGSRVIGYHLERKERNSILWVKLNKTPIPQTKFKTTGLEEGVEYEFRVSAENIVGIGKPSKVSECYVARDPCDPPGRPEAIIVTRNSVTLQWKKPTYDGGSKITGYIVEKKELPEGRWMKASFTNIIDTHFEVTGLVEDHRYEFRVIARNAAGVFSEPSESTGAITARDEVDPPRISMDPKYKDTIVVHAGESFKVDADIYGKPIPTIQWIKGDQELSNTARLEIKSTDFATSLSVKDAVRVDSGNYILKAKNVAGERSVTVNVKVLDRPGPPEGPVVISGVTAEKCTLAWKPPLQDGGSDIINYIVERRETSRLVWTVVDANVQTLSCKVTKLLEGNEYTFRIMAVNKYGVGEPLESEPVVAKNPFVVPDAPKAPEVTTVTKDSMIVVWERPASDGGSEILGYVLEKRDKEGIRWTRCHKRLIGELRLRVTGLIENHDYEFRVSAENAAGLSEPSPPSAYQKACDPIYKPGPPNNPKVIDITRSSVFLSWSKPIYDGGCEIQGYIVEKCDVNVGEWTMCTPPTGINKTNIEVEKLLEKHEYNFRICAINKAGVGEHADVPGPIIVEEKLEAPDIDLDLELRKIINIRAGGSLRLFVPIKGRPTPEVKWGKVDGEIRDAAIIDVTSSFTSLVLDNVNRYDSGKYTLTLENSSGTKSAFVTVRVLDTPSPPVNLKVTEITKDSVSITWEPPLLDGGSKIKNYIVEKREATRKSYAAVVTNCHKNSWKIDQLQEGCSYYFRVTAENEYGIGLPAQTADPIKVAEVPQPPGKITVDDVTRNSVSLSWTKPEHDGGSKIIQYIVEMQAKHSEKWSECARVKSLQAVITNLTQGEEYLFRVVAVNEKGRSDPRSLAVPIVAKDLVIEPDVKPAFSSYSVQVGQDLKMEVPISGRPKPTITWTKDGLPLKQTTRINVTDSLDLTTLSIKETHKDDGGQYGITVANVVGQKTASIEIVTLDKPDPPKGPVKFDDVSAESITLSWNPPLYTGGCQITNYIVQKRDTTTTVWDVVSATVARTTLKVTKLKTGTEYQFRIFAENRYGQSFALESDPIVAQYPYKEPGPPGTPFATAISKDSMVIQWHEPVNNGGSPVIGYHLERKERNSILWTKVNKTIIHDTQFKAQNLEEGIEYEFRVYAENIVGVGKASKNSECYVARDPCDPPGTPEPIMVKRNEITLQWTKPVYDGGSMITGYIVEKRDLPDGRWMKASFTNVIETQFTVSGLTEDQRYEFRVIAKNAAGAISKPSDSTGPITAKDEVELPRISMDPKFRDTIVVNAGETFRLEADVHGKPLPTIEWLRGDKEIEESARCEIKNTDFKALLIVKDAIRIDGGQYILRASNVAGSKSFPVNVKVLDRPGPPEGPVQVTGVTSEKCSLTWSPPLQDGGSDISHYVVEKRETSRLAWTVVASEVVTNSLKVTKLLEGNEYVFRIMAVNKYGVGEPLESAPVLMKNPFVLPGPPKSLEVTNIAKDSMTVCWNRPDSDGGSEIIGYIVEKRDRSGIRWIKCNKRRITDLRLRVTGLTEDHEYEFRVSAENAAGVGEPSPATVYYKACDPVFKPGPPTNAHIVDTTKNSITLAWGKPIYDGGSEILGYVVEICKADEEEWQIVTPQTGLRVTRFEISKLTEHQEYKIRVCALNKVGLGEATSVPGTVKPEDKLEAPELDLDSELRKGIVVRAGGSARIHIPFKGRPMPEITWSREEGEFTDKVQIEKGVNYTQLSIDNCDRNDAGKYILKLENSSGSKSAFVTVKVLDTPGPPQNLAVKEVRKDSAFLVWEPPIIDGGAKVKNYVIDKRESTRKAYANVSSKCSKTSFKVENLTEGAIYYFRVMAENEFGVGVPVETVDAVKAAEPPSPPGKVTLTDVSQTSASLMWEKPEHDGGSRVLGYVVEMQPKGTEKWSIVAESKVCNAVVTGLSSGQEYQFRVKAYNEKGKSDPRVLGVPVIAKDLTIQPSLKLPFNTYSIQAGEDLKIEIPVIGRPRPNISWVKDGEPLKQTTRVNVEETATSTVLHIKEGNKDDFGKYTVTATNSAGTATENLSVIVLEKPGPPVGPVRFDEVSADFVVISWEPPAYTGGCQISNYIVEKRDTTTTTWHMVSATVARTTIKITKLKTGTEYQFRIFAENRYGKSAPLDSKAVIVQYPFKEPGPPGTPFVTSISKDQMLVQWHEPVNDGGTKIIGYHLEQKEKNSILWVKLNKTPIQDTKFKTTGLDEGLEYEFKVSAENIVGIGKPSKVSECFVARDPCDPPGRPEAIVITRNNVTLKWKKPAYDGGSKITGYIVEKKDLPDGRWMKASFTNVLETEFTVSGLVEDQRYEFRVIARNAAGNFSEPSDSSGAITARDEIDAPNASLDPKYKDVIVVHAGETFVLEADIRGKPIPDVVWSKDGKELEETAARMEIKSTIQKTTLVVKDCIRTDGGQYILKLSNVGGTKSIPITVKVLDRPGSPEGPLKVTGVTAEKCYLAWNPPLQDGGANISHYIIEKRETSRLSWTQVSTEVQALNYKVTKLLPGNEYIFRVMAVNKYGIGEPLESGPVTACNPYKPPGPPSTPEVSAITKDSMVVTWARPVDDGGTEIEGYILEKRDKEGVRWTKCNKKTLTDLRLRVTGLTEGHSYEFRVAAENAAGVGEPSEPSVFYRACDALYPPGPPSNPKVTDTSRSSVSLAWSKPIYDGGAPVKGYVVEVKEAAADEWTTCTPPTGLQGKQFTVTKLKENTEYNFRICAINSEGVGEPATLPGSVVAQERIEPPEIELDADLRKVVVLRASATLRLFVTIKGRPEPEVKWEKAEGILTDRAQIEVTSSFTMLVIDNVTRFDSGRYNLTLENNSGSKTAFVNVRVLDSPSAPVNLTIREVKKDSVTLSWEPPLIDGGAKITNYIVEKRETTRKAYATITNNCTKTTFRIENLQEGCSYYFRVLASNEYGIGLPAETTEPVKVSEPPLPPGRVTLVDVTRNTATIKWEKPESDGGSKITGYVVEMQTKGSEKWSTCTQVKTLEATISGLTAGEEYVFRVAAVNEKGRSDPRQLGVPVIARDIEIKPSVELPFHTFNVKAREQLKIDVPFKGRPQATVNWRKDGQTLKETTRVNVSSSKTVTSLSIKEASKEDVGTYELCVSNSAGSITVPITIIVLDRPGPPGPIRIDEVSCDSITISWNPPEYDGGCQISNYIVEKKETTSTTWHIVSQAVARTSIKIVRLTTGSEYQFRVCAENRYGKSSYSESSAVVAEYPFSPPGPPGTPKVVHATKSTMLVTWQVPVNDGGSRVIGYHLEYKERSSILWSKANKILIADTQVKVSGLDEGLMYEYRVYAENIAGIGKCSKSCEPVPARDPCDPPGQPEVTNITRKSVSLKWSKPHYDGGAKITGYIVERRELPDGRWLKCNYTNIQETYFEVTELTEDQRYEFRVFARNAADSVSEPSESTGPIIVKDDVEPPRVMMDVKFRDVIVVKAGEVLKINADIAGRPLPVISWAKDGIEIEERARTEIISTDNHTLLTVKDCIRRDTGQYVLTLKNVAGTRSVAVNCKVLDKPGPPAGPLEINGLTAEKCSLSWGRPQEDGGADIDYYHRKKRETSHLAWTICEGELQMTSCKVTKLLKGNEYIFRVTGVNKYGVGEPLESVAIKALDPFTVPSPPTSLEITSVTKESMTLCWSRPESDGGSEISGYIIERREKNSLRWVRVNKKPVYDLRVKSTGLREGCEYEYRVYAENAAGLSLPSETSPLIRAEDPVFLPSPPSKPKIVDSGKTTITIAWVKPLFDGGAPITGYTVEYKKSDDTDWKTSIQSLRGTEYTISGLTTGAEYVFRVKSVNKVGASDPSDSSDPQIAKEREEEPLFDIDSEMRKTLIVKAGASFTMTVPFRGRPVPNVLWSKPDTDLRTRAYVDTTDSRTSLTIENANRNDSGKYTLTIQNVLSAASLTLVVKVLDTPGPPTNITVQDVTKESAVLSWDVPENDGGAPVKNYHIEKREASKKAWVSVTNNCNRLSYKVTNLQEGAIYYFRVSGENEFGVGIPAETKEGVKITEKPSPPEKLGVTSISKDSVSLTWLKPEHDGGSRIVHYVVEALEKGQKNWVKCAVAKSTHHVVSGLRENSEYFFRVFAENQAGLSDPRELLLPVLIKEQLEPPEIDMKNFPSHTVYVRAGSNLKVDIPISGKPLPKVTLSRDGVPLKATMRFNTEITAENLTINLKESVTADAGRYEITAANSSGTTKAFINIVVLDRPGPPTGPVVISDITEESVTLKWEPPKYDGGSQVTNYILLKRETSTAVWTEVSATVARTMMKVMKLTTGEEYQFRIKAENRFGISDHIDSACVTVKLPYTTPGPPSTPWVTNVTRESITVGWHEPVSNGGSAVVGYHLEMKDRNSILWQKANKLVIRTTHFKVTTISAGLIYEFRVYAENAAGVGKPSHPSEPVLAIDACEPPRNVRITDISKNSVSLSWQQPAFDGGSKITGYIVERRDLPDGRWTKASFTNVTETQFTISGLTQNSQYEFRVFARNAVGSISNPSEVVGPITCIDSYGGPVIDLPLEYTEVVKYRAGTSVKLRAGISGKPAPTIEWYKDDKELQTNALVCVENTTDLASILIKDADRLNSGCYELKLRNAMASASATIRVQILDKPGPPGGPIEFKTVTAEKITLLWRPPADDGGAKITHYIVEKRETSRVVWSMVSEHLEECIITTTKIIKGNEYIFRVRAVNKYGIGEPLESDSVVAKNAFVTPGPPGIPEVTKITKNSMTVVWSRPIADGGSDISGYFLEKRDKKSLGWFKVLKETIRDTRQKVTGLTENSDYQYRVCAVNAAGQGPFSEPSEFYKAADPIDPPGPPAKIRIADSTKSSITLGWSKPVYDGGSAVTGYVVEIRQGEEEEWTTVSTKGEVRTTEYVVSNLKPGVNYYFRVSAVNCAGQGEPIEMNEPVQAKDILEAPEIDLDVALRTSVIAKAGEDVQVLIPFKGRPPPTVTWRKDEKNLGSDARYSIENTDSSSLLTIPQVTRNDTGKYILTIENGVGEPKSSTVSVKVLDTPAACQKLQVKHVSRGTVTLLWDPPLIDGGSPIINYVIEKRDATKRTWSVVSHKCSSTSFKLIDLSEKTPFFFRVLAENEIGIGEPCETTEPVKAAEVPAPIRDLSMKDSTKTSVILSWTKPDFDGGSVITEYVVERKGKGEQTWSHAGISKTCEIEVSQLKEQSVLEFRVFAKNEKGLSDPVTIGPITVKELIITPEVDLSDIPGAQVTVRIGHNVHLELPYKGKPKPSISWLKDGLPLKESEFVRFSKTENKITLSIKNAKKEHGGKYTVILDNAVCRIAVPITVITLGPPSKPKGPIRFDEIKADSVILSWDVPEDNGGGEITCYSIEKRETSQTNWKMVCSSVARTTFKVPNLVKDAEYQFRVRAENRYGVSQPLVSSIIVAKHQFRIPGPPGKPVIYNVTSDGMSLTWDAPVYDGGSEVTGFHVEKKERNSILWQKVNTSPISGREYRATGLVEGLDYQFRVYAENSAGLSSPSDPSKFTLAVSPVDPPGTPDYIDVTRETITLKWNPPLRDGGSKIVGYSIEKRQGNERWVRCNFTDVSECQYTVTGLSPGDRYEFRIIARNAVGTISPPSQSSGIIMTRDENVPPIVEFGPEYFDGLIIKSGESLRIKALVQGRPVPRVTWFKDGVEIEKRMNMEITNVLGSTSLFVRDATRDHRGVYTVEAKNASGSAKAEIKVKVQDTPGKVVGPIRFTNITGEKMTLWWDAPLNDGCAPITHYIIEKRETSRLAWALIEDKCEAQSYTAIKLINGNEYQFRVSAVNKFGVGRPLDSDPVVAQIQYTVPDAPGIPEPSNITGNSITLTWARPESDGGSEIQQYILERREKKSTRWVKVISKRPISETRFKVTGLTEGNEYEFHVMAENAAGVGPASGISRLIKCREPVNPPGPPTVVKVTDTSKTTVSLEWSKPVFDGGMEIIGYIIEMCKTDLGDWHKVNAEACVKTRYTVTDLQAGEEYKFRVSAINGAGKGDSCEVTGTIKAVDRLTAPELDIDANFKQTHVVRAGASIRLFIAYQGRPTPTAVWSKPDSNLSLRADIHTTDSFSTLTVENCNRNDAGKYTLTVENNSGSKSITFTVKVLDTPGPPGPITFKDVTRGSATLMWDAPLLDGGARIHHYVVEKREASRRSWQVISEKCTRQIFKVNDLAEGVPYYFRVSAVNEYGVGEPYEMPEPIVATEQPAPPRRLDVVDTSKSSAVLAWLKPDHDGGSRITGYLLEMRQKGSDLWVEAGHTKQLTFTVERLVEKTEYEFRVKAKNDAGYSEPREAFSSVIIKEPQIEPTADLTGITNQLITCKAGSPFTIDVPISGRPAPKVTWKLEEMRLKETDRVSITTTKDRTTLTVKDSMRGDSGRYFLTLENTAGVKTFSVTVVVIGRPGPVTGPIEVSSVSAESCVLSWGEPKDGGGTEITNYIVEKRESGTTAWQLVNSSVKRTQIKVTHLTKYMEYSFRVSSENRFGVSKPLESAPIIAEHPFVPPSAPTRPEVYHVSANAMSIRWEEPYHDGGSKIIGYWVEKKERNTILWVKENKVPCLECNYKVTGLVEGLEYQFRTYALNAAGVSKASEASRPIMAQNPVDAPGRPEVTDVTRSTVSLIWSAPAYDGGSKVVGYIIERKPVSEVGDGRWLKCNYTIVSDNFFTVTALSEGDTYEFRVLAKNAAGVISKGSESTGPVTCRDEYAPPKAELDARLHGDLVTIRAGSDLVLDAAVGGKPEPKIIWTKGDKELDLCEKVSLQYTGKRATAVIKFCDRSDSGKYTLTVKNASGTKAVSVMVKVLDSPGPCGKLTVSRVTQEKCTLAWSLPQEDGGAEITHYIVERRETSRLNWVIVEGECPTLSYVVTRLIKNNEYIFRVRAVNKYGPGVPVESEPIVARNSFTIPSPPGIPEEVGTGKEHIIIQWTKPESDGGNEISNYLVDKREKESLRWTRVNKDYVVYDTRLKVTSLMEGCDYQFRVTAVNAAGNSEPSERSNFISCREPSYTPGPPSAPRVVDTTKHSISLAWTKPMYDGGTDIVGYVLEMQEKDTDQWYRVHTNATIRNTEFTVPDLKMGQKYSFRVAAVNVKGMSEYSESIAEIEPVERIEIPDLELADDLKKTVTIRAGASLRLMVSVSGRPPPVITWSKQGIDLASRAIIDTTESYSLLIVDKVNRYDAGKYTIEAENQSGKKSATVLVKVYDTPGPCPSVKVKEVSRDSVTITWEIPTIDGGAPINNYIVEKREAAMRAFKTVTTKCSKTLYRISGLVEGTMHYFRVLPENIYGIGEPCETSDAVLVSEVPLVPAKLEVVDVTKSTVTLAWEKPLYDGGSRLTGYVLEACKAGTERWMKVVTLKPTVLEHTVTSLNEGEQYLFRIRAQNEKGVSEPRETVTAVTVQDLRVLPTIDLSTMPQKTIHVPAGRPVELVIPIAGRPPPAASWFFAGSKLRESERVTVETHTKVAKLTIRETTIRDTGEYTLELKNVTGTTSETIKVIILDKPGPPTGPIKIDEIDATSITISWEPPELDGGAPLSGYVVEQRDAHRPGWLPVSESVTRSTFKFTRLTEGNEYVFRVAATNRFGIGSYLQSEVIECRSSIRIPGPPETLQIFDVSRDGMTLTWYPPEDDGGSQVTGYIVERKEVRADRWVRVNKVPVTMTRYRSTGLTEGLEYEHRVTAINARGSGKPSRPSKPIVAMDPIAPPGKPQNPRVTDTTRTSVSLAWSVPEDEGGSKVTGYLIEMQKVDQHEWTKCNTTPTKIREYTLTHLPQGAEYRFRVLACNAGGPGEPAEVPGTVKVTEMLEYPDYELDERYQEGIFVRQGGVIRLTIPIKGKPFPICKWTKEGQDISKRAMIATSETHTELVIKEADRGDSGTYDLVLENKCGKKAVYIKVRVIGSPNSPEGPLEYDDIQVRSVRVSWRPPADDGGADILGYILERREVPKAAWYTIDSRVRGTSLVVKGLKENVEYHFRVSAENQFGISKPLKSEEPVTPKTPLNPPEPPSNPPEVLDVTKSSVSLSWSRPKDDGGSRVTGYYIERKETSTDKVVRHNKTQITTTMYTVTGLVPDAEYQFRIIAQNDVGLSETSPASEPVVCKDPFDKPSQPGELEILSISKDSVTLQWEKPECDGGKEILGYWVEYRQSGDSAWKKSNKERIKDKQFTIGGLLEATEYEFRVFAENETGLSRPRRTAMSIKTKLTSGEAPGIRKEMKDVTTKLGEAAQLSCQIVGRPLPDIKWYRFGKELIQSRKYKMSSDGRTHTLTVMTEEQEDEGVYTCIATNEVGEVETSSKLLLQATPQFHPGYPLKEKYYGAVGSTLRLHVMYIGRPVPAMTWFHGQKLLQNSENITIENTEHYTHLVMKNVQRKTHAGKYKVQLSNVFGTVDAILDVEIQDKPDKPTGPIVIEALLKNSAVISWKPPADDGGSWITNYVVEKCEAKEGAEWQLVSSAISVTTCRIVNLTENAGYYFRVSAQNTFGISDPLEVSSVVIIKSPFEKPGAPGKPTITAVTKDSCVVAWKPPASDGGAKIRNYYLEKREKKQNKWISVTTEEIRETVFSVKNLIEGLEYEFRVKCENLGGESEWSEISEPITPKSDVPIQAPHFKEELRNLNVRYQSNATLVCKVTGHPKPIVKWYRQGKEIIADGLKYRIQEFKGGYHQLIIASVTDDDATVYQVRATNQGGSVSGTASLEVEVPAKIHLPKTLEGMGAVHALRGEVVSIKIPFSGKPDPVITWQKGQDLIDNNGHYQVIVTRSFTSLVFPNGVERKDAGFYVVCAKNRFGIDQKTVELDVADVPDPPRGVKVSDASRDSVNLTWTEPASDGGSKITNYIVEKCATTAERWLRVGQARETRYTVINLFGKTSYQFRVIAENKFGLSKPSEPSEPTITKEDKTRAMNYDEEVDETREVSMTKASHSSTKELYEKYMIAEDLGRGEFGIVHRCVETSSKKTYMAKFVKVKGTDQVLVKKEISILNIARHRNILHLHESFESMEELVMIFEFISGLDIFERINTSAFELNEREIVSYVHQVCEALQFLHSHNIGHFDIRPENIIYQTRRSSTIKIIEFGQARQLKPGDNFRLLFTAPEYYAPEVHQHDVVSTATDMWSLGTLVYVLLSGINPFLAETNQQIIENIMNAEYTFDEEAFKEISIEAMDFVDRLLVKERKSRMTASEALQHPWLKQKIERVSTKVIRTLKHRRYYHTLIKKDLNMVVSAARISCGGAIRSQKGVSVAKVKVASIEIGPVSGQIMHAVGEEGGHVKYVCKIENYDQSTQVTWYFGVRQLENSEKYEITYEDGVAILYVKDITKLDDGTYRCKVVNDYGEDSSYAELFVKGVREVYDYYCRRTMKKIKRRTDTMRLLERPPEFTLPLYNKTAYVGENVRFGVTITVHPEPHVTWYKSGQKIKPGDNDKKYTFESDKGLYQLTINSVTTDDDAEYTVVARNKYGEDSCKAKLTVTLHPPPTDSTLRPMFKRLLANAECQEGQSVCFEIRVSGIPPPTLKWEKDGQPLSLGPNIEIIHEGLDYYALHIRDTLPEDTGYYRVTATNTAGSTSCQAHLQVERLRYKKQEFKSKEEHERHVQKQIDKTLRMAEILSGTESVPLTQVAKEALREAAVLYKPAVSTKTVKGEFRLEIEEKKEERKLRMPYDVPEPRKYKQTTIEEDQRIKQFVPMSDMKWYKKIRDQYEMPGKLDRVVQKRPKRIRLSRWEQFYVMPLPRITDQYRPKWRIPKLSQDDLEIVRPARRRTPSPDYDFYYRPRRRSLGDISDEELLLPIDDYLAMKRTEEERLRLEEELELGFSASPPSRSPPHFELSSLRYSSPQAHVKVEETRKNFRYSTYHIPTKAEASTSYAELRERHAQAAYRQPKQRQRIMAEREDEELLRPVTTTQHLSEYKSELDFMSKEEKSRKKSRRQREVTEITEIEEEYEISKHAQRESSSSASRLLRRRRSLSPTYIELMRPVSELIRSRPQPAEEYEDDTERRSPTPERTRPRSPSPVSSERSLSRFERSARFDIFSRYESMKAALKTQKTSERKYEVLSQQPFTLDHAPRITLRMRSHRVPCGQNTRFILNVQSKPTAEVKWYHNGVELQESSKIHYTNTSGVLTLEILDCHTDDSGTYRAVCTNYKGEASDYATLDVTGGDYTTYASQRRDEEVPRSVFPELTRTEAYAVPSFKKTSEMEASSSVREVKSQMTETRESLSSYEHSASAEMKSAALEEKSLEEKSTTRKIKTTLAARILTKPRSMTVYEGESARFSCDTDGEPVPTVTWLRKGQVLSTSARHQVTTTKYKSTFEISSVQASDEGNYSVVVENSEGKQEAEFTLTIQKARVTEKAVTSPPRVKSPEPRVKSPEAVKSPKRVKSPEPSHPKAVSPTETKPTPREKVQHLPVSAPPKITQFLKAEASKEIAKLTCVVESSVLRAKEVTWYKDGKKLKENGHFQFHYSADGTYELKINNLTESDQGEYVCEISGEGGTSKTNLQFMGQAFKSIHEKVSKISETKKSDQKTTESTVTRKTEPKAPEPISSKPVIVTGLQDTTVSSDSVAKFAVKATGEPRPTAIWTKDGKAITQGGKYKLSEDKGGFFLEIHKTDTSDSGLYTCTVKNSAGSVSSSCKLTIKAIKDTEAQKVSTQKTSEITPQKKAVVQEEISQKALRSEEIKMSEAKSQEKLALKEEASKVLISEEVKKSAATSLEKSIVHEEITKTSQASEEVRTHAEIKAFSTQMSINEGQRLVLKANIAGATDVKWVLNGVELTNSEEYRYGVSGSDQTLTIKQASHRDEGILTCISKTKEGIVKCQYDLTLSKELSDAPAFISQPRSQNINEGQNVLFTCEISGEPSPEIEWFKNNLPISISSNVSISRSRNVYSLEIRNASVSDSGKYTIKAKNFRGQCSATASLMVLPLVEEPSREVVLRTSGDTSLQGSFSSQSVQMSASKQEASFSSFSSSSASSMTEMKFASMSAQSMSSMQESFVEMSSSSFMGISNMTQLESSTSKMLKAGIRGIPPKIEALPSDISIDEGKVLTVACAFTGEPTPEVTWSCGGRKIHSQEQGRFHIENTDDLTTLIIMDVQKQDGGLYTLSLGNEFGSDSATVNIHIRSI

SEQ ID NO: 4769 - protein, 201 aa, Homo Sapiens
MKLTFFLGLLALISCFTPSESQRFSRRPYLPGQLPPPPLYRPRWVPPSPPPPYDSRLNSPLSLPFVPGRVPPSSFSRFSQAVILSQLFPLESIRQPRLFPGYPNLHFPLRPYYVGPIRILKPPFPPIPFFLAIYLPISNPEPQINITTADTTITTNPPTTATATTRHFHKTHNDDQLLNSTYLFNTRACHLHISSNPRSIY

SEQ ID NO: 4770 - protein, 112 aa, Homo Sapiens; identical to SEQ ID NO: 4684

SEQ ID NO: 4771 - protein, 11 aa, Homo Sapiens
MNTSAPPAVSP

SEQ ID NO: 4772 - protein, 35 aa, Homo Sapiens
LKSCMGLKIGDTVRWAGQGLCPGASVGTQPPFFLL

SEQ ID NO: 4773 - protein, 201 aa, Homo Sapiens; identical to SEQ ID NO: 4769

SEQ ID NO: 4774 - protein, 338 aa, Homo Sapiens
EFRKTLETDTVTGKSGEKIDYSTTPRIDEWRDKGYRLVEDGFAEAGTPVYDDNDDVEQIFIVKLDHDTAPVGPNDPHEPETPINPNDPNGPKWPAKDSYTKQYTSTVHFVDENGNKLHDYNVQTSNWTRTLIVDKATGEILNPDEAWHSDIDKYSDVKVDPIKGYYTDRNSVPGEVAQQQDIVNTVVYKQIGKIVPVDPSGNPIPDAPTPQYRNNPNDPTKVIVTNTPEIPGMTPEVPSVTPENPGEDTPIVYNKVETPTPKTVDVTPETPKTVDVTSETPKATPVKTAPQVEKVKAPELPQTGEKQNKALTAVGASIMTGLLGILAFAKKKKDDKEI

SEQ ID NO: 4775 - protein, 673 aa, Homo Sapiens
MDLTKMGMIQLQNPSHPTGLLCKANQMRLAGTLCDVVIMVDSQEFHAHRTVLACTSKMFEILFHRNSQHYTLDFLSPKTFQQILEYAYTATLQAKAEDLDDLLYAAEILEIEYLEEQCLKMLETIQASDDNDTEATMADGGAEEEEDRKARYLKNIFISKHSSEESGYASVAGQSLPGPMVDQSPSVSTSFGLSAMSPTKAAVDSLMTIGQSLLQGTLQPPAGPEEPTLAGGGRHPGVAEVKTEMMQVDEVPSQDSPGAAESSISGGMGDKVEERGKEGPGTPTRSSVITSARELHYGREESAEQVPPPAEAGQAPTGRPEHPAPPPEKHLGIYSVLPNHKADAVLSMPSSVTSGLHVQPALAVSMDFSTYGGLLPQGFIQRELFSKLGELAVGMKSESRTIGEQCSVCGVELPDNEAVEQHRKLHSGMKTYGCELCGKRFLDSLRLRMHLLAHSAGAKAFVCDQCGAQFSKEDALETHRQTHTGTDMAVFCLLCGKRFQAQSALQQHMEVHAGVRSYICSECNRTFPSHTALKRHLRSHTGDHPYECEFCGSCFRDESTLKSHKRIHTGEKPYECNGCDKKFSLKHQLETHYRVHTGEKPFECKLCHQRSRDYSAMIKHLRTHNGASPYQCTICTEYCPSLSSMQKHMKGHKPEEIPPDWRIEKTYLYLCYV

SEQ ID NO: 4776 - protein, 162 aa, Homo Sapiens
MRAPIPEPKPGDLIEIFRPFYRHWAIYVGDGYVVHLAPPSEVAGAGAASVMSALTDKAIVKKELLYDVAGSDKYQVNNKHDDKYSPLPCTKIIQRAEELVGQEVLYKLTSENCEHFVNELRYGVARSDQVRDVIIAASVAGMGLAAMSLIGVMFSRNKRQKQ

SEQ ID NO: 4777 - protein, 579 aa, Homo Sapiens
MEVNAGGVIAYISSSSSASSPASCHSEGSENSFQSSSSSVPSSPNSSNSDTNGNPKNGDLANIEGILKNDRIDCSMKTSKSSAPGMTKSHSGVTKFSGMVLLCKVCGDVASGFHYGVHACEGCKGFFRRSIQQNIQYKKCLKNENCSIMRMNRNRCQQCRFKKCLSVGMSRDAVRFGRIPKREKQRMLIEMQSAMKTMMNSQFSGHLQNDTLVEHHEQTALPAQEQLRPKPQLEQENIKSSSPPSSDFAKEEVIGMVTRAHKDTFMYNQEQQENSAESMQPQRGERIPKNMEQYNLNHDHCGNGLSSHFPCSESQQHLNGQFKGRNIMHYPNGHAICIANGHCMNFSNAYTQRVCDRVPIDGFSQNENKNSYLCNTGGRMHLVCPMSKSPYVDPHKSGHEIWEEFSMSFTPAVKEVVEFAKRIPGFRDLSQHDQVNLLKAGTFEVLMVRFASLFDAKERTVTFLSGKKYSVDDLHSMGAGDLLNSMFEFSEKLNALQLSDEEMSLFTAVVLVSADRSGIENVNSVEALQETLIRALRTLIMKNHPNEASIFTKLLLKLPDLRSLNNMHSEELLAFKVHP

SEQ ID NO: 4778 - protein, 162 aa, Homo Sapiens
MPRADCIMRHLPYFCRGQVVRGFGRGSKQLGIPTANFPEQVVDNLPADISTGIYYGWASVGSGDVHKMVVSIGWNPYYKNTKKSMETHIMHTFKEDFYGEILSVAIVGYLRPEKNFDSLESLISAIQGDIEEAKKRLELPEHLKIKEDNFFQVSKSKIMNGH

SEQ ID NO: 4779 - protein, 163 aa, Homo Sapiens
MRRLLIPLALWLGAVGVGVAELTEAQRRGLQVALEEFHKHPPVQWAFQETSVESAVDTPFPAGIFVRLEFKLQQTSCRKRDWKKPECKVRPNGRKRKCLACIKLGSEDKVLGRLVHCPIETQVLREAEEHQETQCLRVQRAGEDPHSFYFPGQFAFSKALPRS

SEQ ID NO: 4780 - protein, 557 aa, Homo Sapiens
MAQDSVDLSCDYQFWMQKLSVWDQASTLETQQDTCLHVAQFQEFLRKMYEALKEMDSNTVIERFPTIGQLLAKACWNPFILAYDESQKILIWCLCCLINKEPQNSGQSKLNSWIQGVLSHILSALRFDKEVALFTQGLGYAPIDYYPGLLKNMVLSLASELRENHLNGFNTQRRMAPERVASLSRVCVPLITLTDVDPLVEALLICHGREPQEILQPEFFEAVNEAILLKKISLPMSAVVCLWLRHLPSLEKAMLHLFEKLISSERNCLRRIECFIKDSSLPQAACHPAIFRVVDEMFRCALLETDGALEIIATIQVFTQCFVEALEKASKQLRFALKTYFPYTSPSLAMVLLQDPQDIPRGHWLQTLKHISELLREAVEDQTHGSCGGPFESWFLFIHFGGWAEMVAEQLLMSAAEPPTALLWLLAFYYGPRDGRQRAQTMVQVKAVLGHLLAMSRSSSLSAQDLQTVAGQGTDTDLRAPAQQLIRHLLLNFLLWAPGGHTIAWDVITLMAHTAEITHEIIGFLDQTLYRWNRLGIESPRSEKLARELLKELRTQV

SEQ ID NO: 4781 - protein, 1591 aa, Homo Sapiens
IPCFHFPRNKMRKRKISVCQQTWALLCKNFLKKWRMKRESLMEWLNSLLLLLCLYIYPHSHQVNDFSSLLTMDLGRVDTFNESRFSVVYTPVTNTTQQIMNKVASTPFLAGKEVLGLPDEESIKEFTANYPEEIVRVTFTNTYSYHLKFLLGHGMPAKKEHKDHTAHCYETNEDVYCEVSVFWKEGFVALQAAINAAIIEITTNHSVMEELMSVTGKNMKMHSFIGQSGVITDLYLFSCIISFSSFIYYASVNVTRERKRMKALMTMMGLRDSAFWLSWGLLYAGFIFIMALFLALVIRSTQFIILSGFMVVFSLFLLYGLSLVALAFLMSILVKKSFLTGLVVFLLTVFWGCLGFTSLYRHLPASLEWILSLLSPFAFMLGMAQLLHLDYDLNSNAFPHPSDGSNLIVATNFMLAFDTCLYLALAIYFEKILPNEYGHRRPPLFFLKSSFWSQTQKTDHVALEDEMDADPSFHDSFEQAPPEFQGKEAIRIRNVTKEYKGKPDKIEALKDLVFDIYEGQITAILGHSGAGKSTLLNILSGLSVPTKGSVTIYNNKLSEMADLENLSKLTGVCPQSNVQFDFLTVRENLRLFAKIKGILPQEVDKEIFLLDEPTAGLDPFSRHQVWNLLKERKTDRVILFSTQFMDEADILADRKVFLSQGKLKCAGSSLFLKKKWGIGYHLSLQLNEICVEENITSLVKQHIPDAKLSAKSEGKLIYTLPLERTNKFPELYKDLDSYPDLGIENYGVSMTTLNEVFLKLEGKSTINESDIAILGEVQAEKADDTERLVEMEQVLSSLNKMRKTIGGVALWRQQICAIARVRLLKLKHERKALLALLLILMAGFCPLLVEYTMVKIYQNSYTWELSPHLYFLAPGQQPHDPLTQLLIINKTGASIDDFIQSVEHQNIALEVDAFGTRNGTDDPSYNGAITVCCNEKNYSFSLACNAKRLNCFPVLMDIVSNGLLGMVKPSVHIRTERSTFLENGQDNPIGFLAYIMFWLVLTSSCPPYIAMSSIDDYKNRARSQLRISGLSPSAYWFGQALVDVSLYFLVFVFIYLMSYISNFEDMLLTIIHIIQIPCAVGYSFSLIFMTYVISFIFRKGRKNSGIWSFCFYVVTVFSVAGFAFSIFESDIPFIFTFLIPPATMIGCLFLSSHLLFSSLFSEERMDVQPFLVFLIPFLHFIIFLFTLRCLEWKFGKKSMRKDPFFRISPRSSDVCQNPEEPEGEDEDVQMERVRTANALNSTNFDEKPVIIASCLRKEYAGKRKGCFSKRKNKIATRNVSFCVRKGEVLGLLGHNGAGKSTSIKVITGDTKPTAGQVLLKGSGGGDALEFLGYCPQENALWPNLTVRQHLEVYAAVKGLRKGDAEVAITRLVDALKLQDQLKSPVKTLSEGIKRKLCFVLSILGNPSVVLLDEPSTGMDPEGQQQMWQAIRATFRNTERGALLTTHYMAEAEAVCDRVAIMVSGRLRCIGSIQHLKSKFGKDYLLEMKVKNLAQVEPLHAEILRLFPQAARQERYSSLMVYKLPVEDVQPLAQAFFKLEKVKQSFDLEEYSLSQSTLEQVFLELSKEQELGDFEEDFDPSVKWKLLPQEEP

SEQ ID NO: 4782 - protein, 109 aa, Homo Sapiens
SSRSTLGYGSGQHCDGKKTLYVLHSVTNDVTVGMALASGCHSGTGGQLPSGPTQDGTTMRLLPSLLLVMSRAPGGPAKPLEPMAAHVLPCQLLLSWAILAACCGSPRGM

SEQ ID NO: 4783 - protein, 353 aa, Homo Sapiens
MEDGVLKEGFLVKRGHIVHNWKARWFILRQNTLVYYKLEGGRRVTPPKGRILLDGCTITCPCLEYENRPLLIKLKTQTSTEYFLEACSREERDAWAFEITGAIHAGQPGKVQQLHSLRNSFKLPPHISLHRIVDKMHDSNTGIRSSPNMEQGSTYKKTFLGSSLVDWLISNSFTASRLEAVTLASMLMEENFLRPVGVRSMGAIRSGDLAEQFLDDSTALYTFAESYKKKISPKEEISLSTVELSGTVVKQGYLAKQGHKRKNWKVRRFVLRKDPAFLHYYDPSKEENRPVGGFSLRGSLVSALEDNGVPTGVKGNVQGNLFKVITKDDTHYYIQASSKAERAEWIEAIKKLT

SEQ ID NO: 4784 - protein, 872 aa, Homo Sapiens
MGLKARRAAGAAGGGGDGGGGGGGAANPAGGDAAAAGDEERKVGLAPGDVEQVTLALGAGADKDGTLLLEGGGRDEGQRRTPQGIGLLAKTPLSRPVKRNNAKYRRIQTLIYDALERPRGWALLYHALVFLIVLGCLILAVLTTFKEYETVSGDWLLLLETFAIFIFGAEFALRIWAAGCCCRYKGWRGRLKFARKPLCMLDIFVLIASVPVVAVGNQGNVLATSLRSLRFLQILRMLRMDRRGGTWKLLGSAICAHSKELITAWYIGFLTLILSSFLVYLVEKDVPEVDAQGEEMKEEFETYADALWWGLITLATIGYGDKTPKTWEGRLIAATFSLIGVSFFALPAGILGSGLALKVQEQHRQKHFEKRRKPAAELIQAAWRYYATNPNRIDLVATWRFYESVVSFPFFRKEQLEAASSQKLGLLDRVRLSNPRGSNTKGKLFTPLNVDAIEESPSKEPKPVGLNNKERFRTAFRMKAYAFWQSSEDAGTGDPMAEDRGYGNDFPIEDMIPTLKAAIRAVRILQFRLYKKKFKETLRPYDVKDVIEQYSAGHLDMLSRIKYLQTRIDMIFTPGPPSTPKHKKSQKGSAFTFPSQQSPRNEPYVARPSTSEIEDQSMMGKFVKVERQVQDMGKKLDFLVDMHMQHMERLQVQVTEYYPTKGTSSPAEAEKKEDNRYSDLKTIICNYSETGPPEPPYSFHQVTIDKVSPYGFFAHDPVNLPRGGPSSGKVQATPPSSATTYVERPTVLPILTLLDSRVSCHSQADLQGPYSDRISPRQRRSITRDSDTPLSLMSVNHEELERSPSGFSISQDRDDYVFGPNGGSSWMREKRYLAEGETDTDTDPFTPSGSMPLSSTGDGISDSVWTPSNKPI

SEQ ID NO: 4785 - protein, 447 aa, Homo Sapiens [sequence omitted]

SEQ ID NO: 4786 - protein, 2649 aa, Homo Sapiens
MHSSSYSYRSSDSVFSNTTSTRTSLDSNENLLLVHCGPTLINSCISFGSESFDGHRLEMLQQIANRVQRDSVICEDKLILAGNALQSDSKRLESGVQFQNEAEIAGYILECENLLRQHVIDVQILIDGKYYQADQLVQRVAKLRDEIMALRNECSSVYSKGRILTTEQTKLMISGITQSLNSGFAQTLHPSLTSGLTQSLTPSLTSSSMTSGLSSGMTSRLTPSVTPAYTPGFPSGLVPNFSSGVEPNSLQTLKLMQIRKPLLKSSLLDQNLTEEEINMKFVQDLLNWVDEMQVQLDRTEWGSDLPSVESHLENHKNVHRAIEEFESSLKEAKISEIQMTAPLKLTYAEKLHRLESQYAKLLNTSRNQERHLDTLHNFVSRATNELIWLNEKEEEEVAYDWSERNTNIARKKDYHAELMRELDQKEENIKSVQEIAEQLLLENHPARLTIEAYRAAMQTQWSWILQLCQCVEQHIKENTAYFEFFNDAKEATDYLRNLKDAIQRKYSCDRSSSIHKLEDLVQESMEEKEELLQYKSTIANLMGKAKTIIQLKPRNSDCPLKTSIPIKAICDYRQIEITIYKDDECVLANNSHRAKWKVISPTGNEAMVPSVCFTVPPPNKEAVDLANRIEQQYQNVLTLWHESHINMKSVVSWHYLINEIDRIRASNVASIKTMLPGEHQQVLSNLQSRFEDFLEDSQESQVFSGSDITQLEKEVNVCKQYYQELLKSAEREEQEESVYNLYISEVRNIRLRLENCEDRLIRQIRTPLERDDLHESVFRITEQEKLKKELERLKDDLGTITNKCEEFFSQAAASSSVPTLRSELNVVLQNMNQVYSMSSTYIDKLKTVNLVLKNTQAAEALVKLYETKLCEEEAVIADKNNIENLISTLKQWRSEVDEKRQVFHALEDELQKAKAISDEMFKTYKERDLDFDWHKEKADQLVERWQNVHVQIDNRLRDLEGIGKSLKYYRDTYHPLDDWIQQVETTQRKIQENQPENSKTLATQLNQQKMLVSEIEMKQSKMDECQKYAEQYSATVKDYELQTMTYRAMVDSQQKSPVKRRRMQSSADLIIQEFMDLRTRYTALVTLMTQYIKFAGDSLKRLEEEEIKRCKETSEHGAYSDLLQRQKATVLENSKLTGKISELERMVAELKKQKSRVEEELPKVREAAENELRKQQRNVEDISLQKIRAESEAKQYRRELETIVREKEAAERELERVRQLTIEAEAKRAAVEENLLNFRNQLEENTFTRRTLEDHLKRKDLSLNDLEQQKNKLMEELRRKRDNEEELLKLIKQMEKDLAFQKQVAEKQLKEKQKIELEARRKITEIQYTCRENALPVCPITQATSCRAVTGLQQEHDKQKAEELKQQVDELTAANRKAEQDMRELTYELNALQLEKTSSEEKARLLKDKLDETNNTLRCLKLELERKDQAEKGYSQQLRELGRQLNQTTGKAEEAMQEASDLKKIKRNYQLELESLNHEKGKLQREVDRITRAHAVAEKNIQHLNSQIHSFRDEKELERLQICQRKSDHLKEQFEKSHEQLLQNIKAEKENNDKIQRLNEELEKSNECAEMLKQKVEELTRQNNETKLMMQRIQAESENIVLEKQTIQQRCEALKIQADGFKDQLRSTNEHLHKQTKTEQDFQRKIKCLEEDLAKSQNLVSEFKQKCDQQNIIIQNTKKEVRNLNAELNASKEEKRRGEQKVQLQQAQVQELNNRLKKVQDELHLKTIEEQMTHRKMVLFQEESGKFKQSAEEFRKKMEKLMESKVITENDISGIRLDFVSLQQENSRAQENAKLCETNIKELERQLQQYREQMQQGQHMEANHYQKCQKLEDELIAQKREVENLKQKMDQQIKEHEHQLVLLQCEIQKKSTAKDCTFKPDFEMTVKECQHSGELSSRNTGHLHPTPRSPLLRWTQEPQPLEEKWQHRVVEQIPKEVQFQPPGAPLEKEKSQQCYSEYFSQTSTELQITFDETNPITRLSEIEKIRDQALNNSRPPVRYQDNACEMELVKVLTPLEIAKNKQYDMHTEVTTLKQEKNPVPSAEEWMLEGCRASGGLKKGDFLKKGLEPETFQNFDGDHACSVRDDEFKFQGLRHTVTARQLVEAKLLDMRTIEQLRLGLKTVEEVQKTLNKFLTKATSIAGLYLESTKEKISFASAAERIIIDKMVALAFLEAQAATGFIIDPISGQTYSVEDAVLKGVVDPEFRIRLLEAEKAAVGYSYSSKTLSVFQAMENRMLDRQKGKHILEAQIASGGVIDPVRGIRVPPEIALQQGLLNNAILQFLHEPSSNTRVFPNPNNKQALYYSELLRMCVFDVESQCFLFPFGERNISNLNVKKTHRISVVDTKTGSELTVYEAFQRNLIEKSIYLELSGQQYQWKEAMFFESYGHSSHMLTDTKTGLHFNINEAIEQGTIDKALVKKYQEGLITLTELADSLLSRLVPKKDLHSPVAGYWLTASGERISVLKASRRNLVDRITALRCLEAQVSTGGIIDPLTGKKYRVAEALHRGLVDEGFAQQLRQCELVITGIGHPITNKMMSVVEAVNANIINKEMGIRCLEFQYLTGGLIEPQVHSRLSIEEALQVGIIDVLIATKLKDQKSYVRNIICPQTKRKLTYKEALEKADFDFHTGLKLLEVSEPLMTGISSLYYSS

SEQ ID NO: 4787 - protein, 299 aa, Homo Sapiens
MSRGPSSAVLPSALGSRKLGPRSLSCLSDLDGGVALEPRACRPPGSPGRAPPPTPAPSGCDPRLRPIILRRARSLPSSPERRQKAAGAPGAACRPGCSQKLRVRFADALGLELAQVKVFNAGDDPSVPLHVLSRLAINSDLCCSSQDLEFTLHCLVPDFPPPVEAADFGERLQRQLVCLERVTCSDLGISGTVRVCNVAFEKQVAVRYTFSGWRSTHEAVARWRGPAGPEGTEDVFTFGFPVPPFLLELGSRVHFAVRYQVAGAEYWDNNDHRDYSLTCRNHALHMPRGECEESWIHFI

SEQ ID NO: 4788 - protein, 1103 aa, Homo Sapiens
MAEAELHKERLQAIAEKRKRQTEIEGKRQQLDEQILLLQHSKSKVLREKWLLQGIPAGTAEEEEARRRQSEEDEFRVKQLEDNIQRLEQEIQTLESEESQISAKEQIILEKLKETEKSFKDFQKGFSSTDGDAVNYISSQLPDLPILCSRTAEPSPGQDGTSRAAGVGWENVLLKEGESASNATETSGPDMTIKKPPQLSEDDIWLKSEGDNYSATLLEPAASSLSPDHKNMEIEVSVAECKSVPGITSTPHPMDHPSAFYSPPHNGLLTDHHESLDNDVAREIRYLDEVLEANCCDSAVDGTYNGTSSPEPGAVVLVGGLSPPVHEATQPEPTERTASRQAPPHIELSNSSPDPMAEAERTNGHSPSQPRDALGDSLQVPVSPSSTTSSRCSSRDGEFTLTTLKKEAKFELRAFHEDKKPSKLFEDDEHEKEQYCIRKVRPSEEMLELEKERRELIRSQAVKKNPGIAAKWWNPPQEKTIEEQLDEEHLESHKKYKERKERRAQQEQLLLQKQLQQQQQQPPSQLCTAPASSHERASMIDKAKEDIVTEQIDFSAARKQFQLMENSRQAVAKGQSTPRLFSIKPFYRPLGSVNSDKPLTNPRPPSVGGPPEDSGASAAKGQKSPGALETPSAAGSQGNTASQGKEGPYSEPSKRGPLSKLWAEDGEFTSARAVLTVVKDDDHGILDQFSRSVNVSLTQEELDSGLDELSVRSQDTTVLETLSNDFSMDNISDSGASNETTNALQENSLADFSLPQTPQTDNPSEGRGEGVSKSFSDHGFYSPSSTLGDSPLVDDPLEYQAGLLVQNAIQQAIAEQVDKAVSKTSRDGAEQQGPEATVEEAEAAAFGSEKPQSMFEPPQVSSPVQEKRDVLPKILPAEDRALRERGPPQPLPAVQPSGPINMEETRPEGSYFSKYSEAAELRSTASLLATQESDVMVGPFKLRSRKQRTLSMIEEEIRAAQEREEELKRQRQVLQSTQSPRTKNAPSLPSRTCYKTAPGKIEKVKPPPSPTTEGPSLQPDLAPEEAAGTQRPKNLMQTLMEDYETHKSKRRERMDDSSYTSKLLSCKVTSEVLEATRVNRRKSALALRWEAGIYANQEEEDNE

SEQ ID NO: 4789 - protein, 1534 aa, Homo Sapiens
TNVPSSPKKSSSDFYSRELIFRMSVNISTAGKGVDPNTVDTYDSGDDWEIGVGNLIIDLDADLEKDRQKFEMNNSTTTTSSSNSKDCGGPASSGAGATAALADGLKFASVQASAPQGNSHKETSKSKVKRSKTSKDANKSLPSAALYGIPEISSTGKRQEVQGRPGEATGMNSALGQSVSSGGSGNPNSNSTSTSTSAATAGAGSCGKSKEEKPGKSQSSRGAKRDKDAGKSRKDKHDLLQGHQNGSGSQAPSGGHLYGFGAKSNGGGASPFHCGGTGSGSVAAAGEVSKSAPDSGLMGNSMLVKKEEEEEESHRRIKKLKTEKVDPLFTVPAPPPPISSSLTPQILPSYFSPSSSNIAAPVEQLLVRTRSVGVNTCEVGVVTEPECLGPCEPGTSVNLEGIVWHETEEGVLVVNVTWRNKTYVGTLLDCTKHDWAPPRFCESPTSDLEMRGGRGRGKRARSAAAAPGSEASFTESRGLQNKNRGGANGKGRRGSLNASGRRTPPNCAAEDIKASPSSTNKRKNKPPMELDLNSSSEDNKPGKRVRTNSRSTPTTPQGKPETTFLDQGCSSPVLIDCPHPNCNKKYKHINGLRYHQAHAHLDPENKLEFEPDSEDKISDCEEGLSNVALECSEPSTSVSAYDQLKAPASPGAGNPPGTPKGKRELMSNGPGSIIGAKAGKNSGKKKGLNNELNNLPVISNMTAALDSCSAADGSLAAEMPKLEAEGLIDKKNLGDKEKGKKANNCKTDKNLSKLKSARPIAPAPAPTPPQLIAIPTATFTTTTTGTIPGLPSLTTTVVQATPKSPPLKPIQPKPTIMGEPITVNPALVSLKDKKKKEKRKLKDKEGKETGSPKMDAKLGKLEDSKGASKDLPGHFLKDHLNKNEGLANGLSESQESRMASIKAEADKVYTFTDNAPSPSIGSASRLECSTLVNGQAPMAPLHVLTQNGAESSAAKTSSPAYSDISDAADDGGSDSRSEGMRSKASSPSDIISSKDSVVKGHSSTTAQSSQLKESHSPYYHSYDPYYSPSYMHPGQVGAPAAGNSGSTQGMKIKKESEEDAEKKDKAEQLDSKKVDHNSASLQPQHQSVITQRHPALAQSLYYGQYAYGLYMDQKSLMATSPAYRQQYEKYYEDQRLAEQKMAQTGRGDCERKSELPLKELGKEETKQKNMPSATISKAPSTPEPNKNHSKLGPSVPNKTEETGKSQLLSNHQQQLQADSFKAKQMENHQLIKEAVEMKSVMDSMKQTGVDPTSRFKQDPDSRTWHHYVYQPKYLDQQKSEELDREKKLKEDSPRKTPNKESGVPSLPVSLTSIKEEPKEAKHPDSQSMEESKLKNDDRKTPVNWKDSRGTRVAVSSPMSQHQSYIQYLHAYPYPQMYDPSHPAYRAVSPVLMHSYPGAYLSPGFHYPVYGKMSGREETEKVNTSPSVNTKTTTESKALDLLQQHANQYRSKSPAPVEKATAEREREAERERDRHSPFGQRHLHTHHHTHVGMGYPLIPGQYDPFQGLTSAALVASQQVAAQASASGMFPGQRRE

SEQ ID NO: 4790 - protein, 363 aa, Homo Sapiens
MAHVLQKPKHSGTHSIVQEFQVPDYVPWQQSKQETKPSTLPPVQQANSLHTSKMKTLTRVQPVFHFKPTTVVTSCQPKNPRELHRRRKLDPGKMHAKIWLMKTSLRSGRAALRELRSRENFLSKLNRELIETIQEMENSTTLHVRALLQQQDTLATIIDILEYSNKKRLQQLKSELQEWEEKKKCKMSYLEQQAEQLNAKIEKTQEEVNFLSTYMDHEYSIKSVQISTLMRQLQQVKDSQQDELDDLGEMRRKVLESLSDKIQKKKKKILSSVVAETQRPYEEALLQKMWESQDFLKCMQRFREIIDQFEENMPVLRAEVEELQAQTREPREVIFEDVLLRRPKCTPDMDVILNIPVEEPLPF

SEQ ID NO: 4791 - protein, 311 aa, Homo Sapiens
MEATRRRQHLGATGGPGAQLGASFLQARHGSVSADEAARTAPFHLDLWFYFTLQNWVLDFGRPIAMLVFPLEWFPLNKPSVGDYFHMAYNVITPFLLLKLIERSPRTLPRSITYVSIIIFIMGASIHLVGDSVNHRLLFSGYQHHLSVRENPIIKNLKPETLIDSFELLYYYDEYLGHCMWYIPFFLILFMYFSGCFTASKAESLIPGPALLLVAPSGLYYWYLVTEGQIFILFIFTFFAMLALVLHQKRKRLFLDSNGLFLFSSFALTLLLVALWVAWLWNDPVLRKKYPGVIYVPEPWAFYTLHVSSRH

SEQ ID NO: 4792 - protein, 917 aa, Homo Sapiens
SPGGRTPAARDSIVREVIQNSKEVLSLLQEKNPAFKPVLAIIQAGDDNLMQEINQNLAEEAGLNITHICLPPDSSEAEIIDEILKINEDTRVHGLALQISENLFSNKVLNALKPEKDVDGVTDINLGKLVRGDAHECFVSPVAKAVIELLEKSGVNLDGKKILVVGAHGSLEAALQCLFQRKGSMTMSIQWKTRQLQSKLHEADIVVLGSPKPEEIPLTWIQPGTTVLNCSHDFLSGKVGCGSPRIHFGGLIEEDDVILLAAALRIQNMVSSGRRWLREQQHRRWRLHCLKLQPLSPVPSDIEISRGQTPKAVDVLAKEIGLLADEIEIYGKSKAKVRLSVLERLKDQADGKYVLVAGITPTPLGEGKSTVTIGLVQALTAHLNVNSFACLRQPSQGPTFGVKGGAAGGGYAQVIPMEEFNLHLTGDIHAITAANNLLAAAIDTRILHENTQTDKALYNRLVPLVNGVREFSEIQLARLKKLGINKTDPSTLTEEEVSKFARLDIDPSTITWQRVLDTNDRFLRKITIGQGNTEKGHYRQAQFDIAVASEIMAVLALTDSLADMKARLGRMVVASDKSGQPVTADDLGVTGALTVLMKDAIKPNLMQTLEGTPVFVHAGPFANIAHGNSSVLADKIALKLVGEEGFVVTEAGFGADIGMEKFFNIKCRASGLVPNVVVLVATVRALKMHGGGPSVTAGVPLKKEYTEENIQLVADGCCNLQKQIQITQLFGVPVVVALNVFKTDTRAEIDLVCELAKRAGAFDAVPCYHWSVGGKGSVDLARAVREAASKRSRFQFLYDVQVPIVDKIRTIAQAVYGAKDIELSPEAQAKIDRYTQQGFGNLPICMAKTHLSLSHQPDKKGVPRDFILPISDVRASIGAGFIYPLVGTMSTMPGLPTRPCFYDIDLDTETEQVKGLF

SEQ ID NO: 4793 - protein, 340 aa, Homo Sapiens
MLEAPGPSDGCELSNPSASRVSCAGQMLEVQPGLYFGGAAAVAEPDHLREAGITAVLTVDSEEPSFKAGPGVEDLWRLFVPALDKPETDLLSHLDRCVAFIGQARAEGRAVLVHCHAGVSRSVAIITAFLMKTDQLPFEKAYEKLQILKPEAKMNEGFEWQLKLYQAMGYEVDTSSAIYKQYRLQKVTEKYPELQNLPQELFAVDPTTVSQGLKDEVLYKCRKCRRSLFRSSSILDHREGSGPIAFAHKRMTPSSMLTTGRQAQCTSYFIEPVQWMESALLGVMDGQLLCPKCSAKLGSFNWYGEQCSCGRWITPAFQIHKNRVDEMKILPVLGSQTGKI

SEQ ID NO: 4794 - protein, 525 aa, Homo Sapiens
MSWHPQYRSSKFRHVFGKPASKENCYDSVPITRSVHDNHFCAVNPHFIAVVTECAGGGAFLVIPLHQTGKLDPHYPKVCGHRGNVLDVKWNPFDDFEIASCSEDATIKIWSIPKQLLTRNLTAYRKELVGHARRVGLVEWHPTAANILFSAGYDYKVMIWNLDTKESVITSPMSTISCHQDVILSMSFNTNGSLLATTCKDRKIRVIDPRAGTVLQEASYKGHRASKVLFLGNLKKLMSTGTSRWNNRQVALWDQDNLSVPLMEEDLDGSSGVLFPFYDADTSMLYVVGKGDGNIRYYEVSADKPHLSYLTEYRSYNPQKGIGVMPKRGLDVSSCEIFRFYKLITTKSLIEPISMIVPRQSESYQEDIYPPTAGAQPSLTAQEWLSGMNRDPILVSLRPGSELLRPHPLPAERPIFNSMAPASPRLLNQTEKLAAEDGWRSSSLLEEKMPRWAAEHRLEEKKTWLTNGFDVFECPPPKTENELLQMFYRQQEEIRRLRELLTQREVQAKQLELEIKNLRMGSEQL

SEQ ID NO: 4795 - protein, 165 aa, Homo Sapiens
MAPNASCLCVHVRSEEWDLMTFDANPYDSVKKIKEHVRSKTKVPVQDQVLLLGSKILKPRRSLSSYGIDKEKTIHLTLKVVKPSDEELPLFLVESGDEAKRHLLQVRRSSSVAQVKAMIETKTGIIPETQIVTCNGKRLEDGKMMADYGIRKGNLLFLASYCIGG

SEQ ID NO: 4796 - protein, 682 aa, Homo Sapiens
MVSSNFWFKYPKTCSKVEHFVSILGKCFESPWTTKALSETACEDSEENKQRITGAQTLPKHVSTSSDEGSPSASTPMINKTGFKFSAEKPVIEVPSMTILDKKDGEQAKALFEKVRKFRAHVEDSDLIYKLYVVQTVIKTAKFIFILCYTANFVNAISFEHVCKPKVEHLIGYEVFECTHNMAYMLKKLLISYISIICVYGFICLYTLFWLFRIPLKEYSFEKVREESSFSDIPDVKNDFAFLLHMVDQYDQLYSKRFGVFLSEVSENKLREISLNHEWTFEKLRQHISRNAQDKQELHLFMLSGVPDAVFDLTDLDVLKLELIPEAKIPAKISQMTNLQELHLCHCPAKVEQTAFSFLRDHLRCLHVKFTDVAEIPAWVYLLKNLRELYLIGNLNSENNKMIGLESLRELRHLKILHVKSNLTKVPSNITDVAPHLTKLVIHNDGTKLLVLNSLKKMMNVAELELQNCELERIPHAIFSLSNLQELDLKSNNIRTIEEIISFQHLKRLTCLKLWHNKIVTIPPSITHVKNLESLYFSNNKLESLPVAVFSLQKLRCLDVSYNNISMIPIEIGLLQNLQHLHITGNKVDILPKQLFKCIKLRTLNLGQNCITSLPEKVGQLSQLTQLELKGNCLDRLPAQLGQCRMLKKSGLVVEDHLFDTLPLEVKEALNQDINIPFANGI

SEQ ID NO: 4797 - protein, 146 aa, Homo Sapiens
MVDELVLLLHALLMRHRALSIENSQLMEQLRLLVCERASLLRQVRPPSCPVPFPETFNGESSRLPEFIVQTASYMLVNENRFCNDAMKVAFLISLLTGEAEEWVVPYIEMDSPILGDYRAFLDEMKQCFGWDDDEDDDDEEEEDDY

SEQ ID NO: 4798 - protein, 332 aa, Homo Sapiens
MLLETQDALYVALELVIAALSVAGNVLVCAAVGTANTLQTPTNYFLVSLAAADVAVGLFAIPFAITISLGFCTDFYGCLFLACFVLVLTQSSIFSLLAVAVDRYLAICVPLRYKSLVTGTRARGVIAVLWVLAFGIGLTPFLGWNSKDSATNNCTEPWDGTTNESCCLVKCLFENVVPMSYMVYFNFFGCVLPPLLIMLVIYIKIFLVACRQLQRTELMDHSRTTLQREIHAAKSLAMIVGIFALCWLPVHAVNCVTLFQPAQGKNKPKWAMNMAILLSHANSVVNPIVYAYRNRDFRYTFHKIISRYLLCQADVKSGNGQAGVQPALGVGL

SEQ ID NO: 4799 - protein, 343 aa, Homo Sapiens
MLVVQMPFSFPMAHFILFVFTVSTIFHVQQRLAKIQAMWELPVQIPVLASTSKALGPSQLRGMWTINAIGRLGNQMGEYATLYALAKMNGRPAFIPAQMHSTLAPIFRITLPVLHSATASRIPWQNYHLNDWMEEEYRHFPGEYVRFTGYPCSWTFYHHLRQEILQEFTLHDHVREEAQKFLRGLQVNGSRPGTFVGVHVRRGDYVHVMPKVWKGVVADRRYLQQALDWFRARYSSLIFVVTSNGMAWCRENIDTSHGDVVFAGDGIEGSPAKDFALLTQCNHTIMTIGTFGIWAAYLTGGDTIYLANYTLPDSPFLKIFKPEAAFLPEWTGIAADLSPLLKH

SEQ ID NO: 4800 - protein, 103 aa, Homo Sapiens [sequence omitted]

SEQ ID NO: 4801 - protein, 93 aa, Homo Sapiens
MKLLMVLMLAALSQHCYAGSGCPLLENVISKTINPQVSKTEYKELLQEFIDDNATTNAIDELKECFLNQTDETLSNVEVFMQLIYDSSLCDLF

SEQ ID NO: 4802 - protein, 94 aa, Homo Sapiens
MIITCVFICSLLHSGCSWSQGLRIIFSDASRLIFRLSSSSGVRATLRLYAESYERDPSGHDQEPQAVLSPLIAIALKISQIHERTGRRGPTVIT

SEQ ID NO: 4803 - protein, 210 aa, Homo Sapiens [sequence omitted]

SEQ ID NO: 4804 - protein, 529 aa, Homo Sapiens
MFTVLTRQPCEQAGLKALYRTPTIIALVVLLVSIVVLVSITVIQIHKQEVLPPGLKYGIVLDAGSSRTTVYVYQWPAEKENNTGVVSQTFKCSVKGSGISSYGNNPQDVPRAFEECMQKVKGQVPSHLHGSTPIHLGATAGMRLLRLQNETAANEVLESIQSYFKSQPFDFRGAQIISGQEEGVYGWITANYLMGNFLEKNLWHMWVHPHGVETTGALDLGGASTQISFVAGEKMDLNTSDIMQVSLYGYVYTLYTHSFQCYGRNEAEKKFLAMLLQNSPTKNHLTNPCYPRDYSISFTMGHVFDSLCTVDQRPESYNPNDVITFEGTGDPSLCKEKVASIFDFKACHDQETCSFDGVYQPKIKGPFVAFAGFYYTASALNLSGSFSLDTFNSSTWNFCSQNWSQLPLLLPKFDEVYARSYCFSANYIYHLFVNGYKFTEETWPQIHFEKEVGNSSIAWSLGYMLSLTNQIPAESPLIRLPIEPPVFVGTLAFFTVAALLCLAFLAYLCSATRRKRHSEHAFDHAVDSD

SEQ ID NO: 4805 - protein, 417 aa, Homo Sapiens
MRLILPVGLIATTLAIAPVRFDREKVFRVKPQDEKQADIIKDLAKTNELDFWYPGATHHVAANMMVDFRVSEKESQAIQSALDQNKMHYEILIHDLQEEIEKQFDVKEDIPGRHSYAKYNNWEKIVAWTEKMMDKYPEMVSRIKIGSTVEDNPLYVLKIGEKNERRKAIFMDCGIHAREWVSPAFCQWFVYQATKTYGRNKIMTKLLDRMNFYILPVFNVDGYIWSWTKNRMWRKNRSKNQNSKCIGTDLNRNFNASWNSIPNTNDPCADNYRGSAPESEKETKAVTNFIRSHLNEIKVYITFHSYSQMLLFPYGYTSKLPPNHEDLAKVAKIGTDVLSTRYETRYIYGPIESTIYPISGSSLDWAYDLGIKHTFAFELRDKGKFGFLLPESRIKPTCRETMLAVKFIAKYILKHTS

SEQ ID NO: 4806 - protein, 2137 aa, Homo Sapiens
MTSATEFENVGNQPPYSRINARWDAPDDELDNDNSSARLFERSRIKALADEREVVQKKTFTKWVNSHLARVSCRITDLYKDLRDGRMLIKLLEVLSGEMLPKPTKGKMRIHCLENVDKALQFLKEQRVHLENMGSHDIVDGNHRLVLGLIWTIILRFQIQDIVVQTQEGRETRSAKDALLLWCQMKTAGYPHVNVTNFTSSWKDGLAFNALIHKHRPDLIDFDKLKDSNARHNLEHAFNVAERQLGIIPLLDPEDVFTENPDEKSIITYVVAFYHYFSKMKVLAVEGKRVGKVIDHAIETEKMIEKYSGLASDLLTWIEQTITVLNSRKFANSLTGVQQQLQAFSTYRTVEKPPKFQEKGNLEVLLFTIQSRMRANNQKVYTPHDGKLVSDINRAWESLEEAGYRRELALRNELIRQEKLEQLARRFDRKAAMRETWLNENQRLVAQDNFGYDLAAVEAAKKKHEAIETDTAAYEERVRALEDLAQELEKENYHDQKRITARKDNILRLWSYLQELLQSRRQRLETTLALQKLFQDMLHSIDWMDEIKAHLLSAEFGKHLLEVEDLLQKHKLMEADIAIQGDKVKAITAATLKFTEGKGYQPCDPQVIQDRMSHLEQCFEELSNMAAGARTQLEQSKRLWKFFWEMDEAESWIKEKEQIYSSLDYGKDLTSVLILQRKHKAFEDELRGLDAHLEQIFQEAHGMVARKQFGHPQIEARIKEVSAQWDQLKDLAAFCKKNLQDAENFFQFQGDADDLKAWLQDAHRLLSGEDVGQDEGATRALGKKHKDFLEELEESRGVMEHLEQQAQGFPEEFRDSPDVTHRLQALRELYQQVVAQADLRQQRLQEALDLYTVFGETDACELWMGEKEKWLAEMEMPDTLEDLEVVQHRFDILDQEMKTLMTQIDGVNLAANSLVESGHPRSREVKQYQDHLNTRWQAFQTLVSERREAVDSALRVHTLCVDCEETSKWITDKTKVVESTKDLGRDLAGIIAIQRKLSGLERDVAAIQARVDALERESQQLMDSHPEQKENIGQRQKHLEELWQGLQQSLQGQEDLLGEVSQLQAFLQDLDDFQAWLSITQKAVASEDMPESLPEAEQLLQQHAGIKDEIDGHQDSYQRVKESGEKVIQGQTDPEYLLLGQRLEGLDTGWDALGRMWESRSHTLAQCLGFQEFQKDAKQAEAILSNQEYTLAHLEPPDSLEAAEAGIRKFEDFLGSMENNRDKVLSPVDSGNKLVAEGNLYSDKIKEKVQLIEDRHRKNNEKAQEASVLLRDNLELQNFLQNCQELTLWINDKLLTSQDVSYDEARNLHNKWLKHQAFVAELASHEGWLENIDAEGKQLMDEKPQFTALVSQKLEALHRLWDELQATTKEKTQHLSAARSSDLRLQTHADLNKWISAMEDQLRSDDPGKDLTSVNRMLAKLKRVEDQVNVRKEELGELFAQVPSMGEEGGDADLSIEKRFLDLLEPLGRRKKQLESSRAKLQISRDLEDETLWVEERLPLAQSADYGTNLQTVQLFMKKNQTLQNEILGHTPRVEDVLQRGQQLVEAAEIDCQDLEERLGHLQSSWDRLREAAAGRLQRLRDANEAQQYYLDADEAEAWIGEQELYVISDEIPKDEEGAIVMLKRHLRQQRAVEDYGRNIKQLASRAQGLLSAGHPEGEQIIRLQGQVDKHYAGLKDVAEERKRKLENMYHLFQLKRETDDLEQWISEKELVASSPEMGQDFDHVTLLRDKFRDFARETGAIGQERVDNVNAFIERLIDAGHSEAATIAEWKDGLNEMWADLLELIDTRMQLLAASYDLHRYFYTGAEILGLIDEKHRELPEDVGLDASTAESFHRVHTAFERDVHLLGVQVQQFQDVATRLQTAYAGEKAEAIQNKEQEVSAAWQALLDACAGRRTQLVDTADKFRFFSMARDLLSWMESIIRQIETQERPRDVSSVELLMKYHQGINAEIETRSKNFSACLELGESLLQRQHQASEEIREKLQQVMSRRKEMNEKWEARWERLRMLLEVCQFSRDASVAEAWLIAQEPYLASGDFGHTVDSVEKLIKRHEAFEKSTASWAERFAALEKPTTLELKERQIAERPAEETGPQEEEGETAGEAPVSHHAATERTSPVSLWSRLSSSWESLQPEPSHPY

SEQ ID NO: 4807 - protein, 2099 aa, Homo Sapiens
MDRDDLTDDSVFTRSSQCSRGLERYISQEEGPLSPFLGQLDEDYRTKETFLHRSDYSPHISCHDELLRGTERNREKLKGYSIRSEERSREAKRPRYDDTVKINSMGGDHPSFTSGTRNYRQRRRSPSPRFLDPEFRELDLARRKREEEEERSRSLSQELVGVDGGGTGCSIPGLSGVLTASEPGYSLHRPEEVSVMPKKSILKKRIEVDIMEPSMQLESFSSSTSSSQDHPLYSGHPSLPLSGAIAAFASEIENKGTMVETALKEPQGNLYQWGPLPGIPKDNSPLREKFGSFLCHKDNLDLKAEGPERHTDFLLPHERASQDGSGFSRILSMLADSTSTQEKRRRSFPDIEDEEKFLYGDEEEDLKAESVPKPLGSSESEVMRQKASSLPSSAPAVKLESLEETNPEYAKIHDLLKTIGLDIGVAEISQLAARTQERLHGKKPSLRSSADRRSSVDRYFSADHCSSVDHRFSADRCSSVDHCFSADRRSSDPHRLESREAHHSNTHSPEVSHPHPPSPVDPYLLTKNSPPFLKSDHPVGHISGPEVVGSGFQSSVAVRCMLPSAPSAPIRLPHTAALSQFHMPRASQFAAARIPPNYQGPAIPPASFDAYRHYMAYAASRWPMYPTSQPSNHPVPEPHRIMPITKQATRSRPNLRVIPTVTPDKPKQKESLRGSIPAAQVPVQVSIPSLIRYNPEKISDEKNRASQKQKVIEEREKLKNDREARQKKMYYLRTELERLHKQQGEMLRKKRREKDGHKDPLLVEVSRLQDNIMKDIAELRQEAEEAEKKQSELDKVAQILGINIFDKSQKSLSDSREPTEKPGKAEKSKSPEKVSSFSNSSSNKESKVNNEKFCIKSPKPAESPQSATKQLDQPTAAYEYYDAGNHWCKDCNTICGTMFDFFTHMHNKKHTQTLDPYNRPWASKTQSEAKQDAIKRTDKITVPAKGSEFLVPISGFYCQLCEEFLGDPISGEQHVKGHQHNEKYKKYVDENPLYEERRNLDRQAGLAVVLETERRRQSELKRKLSEKPKEEKKEKKAKAVKEVKEDDKVSEKLEDQLSEGRNSPEKAENKRNTGIKLQFKEEVKKESPTSSSFGKFSWKKPEKEEEKSSLVTPSISKEEILESSKDKEDGKTEAGKAKPIKIKLSGKTVVAHTSPWMPVVTTSTQTKIGPNLPIPSTVLRKSCSATMSKPAPLNTFLSIKSSGTTAKPLPVVKESSADLLLPPDIISKAFGGEEVILKGSPEEKVVLAEKSEPSHLPEQILPPPPPPPPPPPPPPPVIPHPAAPSAAQANAILAPVKSNPVVSQTLSPGFVGPNILNPVLPVAIMASAQPAAIPSDETAPGVSESDRDQTLFSVLVRPPPPLSSVFSEQAKKLEKRNSCLATANAKDLYDIFYSSGGKGAPETKGAPETKLSGGPLANGENSNLSRTKSSDTSSTSPLNSSASQEELHQDEGLVAAPIVSNSEKPIAKTLVALGKWSVVEHVGPKSTGSTYGFLQPLTRLCQSRPYETITPKTDTLAIWTSSSFQSDTSRDISPEKSELDLGEPGPPGVEPPPQLLDIQCKESQKLVEIHLRESVNQDKESQELRKSEDCRESEIETNTELKERVKELSEGIVDEGASTSIGPHSIDDSNLNHGNRYMWEGEVKQPNLLMIDKEAEQSNKLMTGSETPSKVVIKLSPQACSFTKAKLDSFLSEARSLLNPQDTPVKISAPELLLHSPARSAMCLTGSPQEQGVSVVSEEGLENSAPESASRTSRYRSLKLKRERSKDFQVKKIYELAVWDENKKRPETWESPEKPKTEALELQDVHPELTVTIESKALEDFEATDLKVEELTALGNLGDMPVDFCTTRVSPAHRSPTVLCQKVCEENSVSPIGCNSSDPADFEPIPSFSGFPLDSPKTLVLDFETEGERNSPNPRSVRIPSPNILKTGLTENVDRGLGGLEGTHQALDLLAGGMMPEEVKESSQLDKQESLGLELKTINFAGLGPSPCLPDLVDFVTRTSGVQKDKLCSPLSEPGDPSKCSSLELGPLQLEISNASTTEVAILQVDDDSGDPLNLVKAPVSRSPPREQVIEDNMVPQGMPEQETTVGAIQDHTESSVHN

SEQ ID NO: 4808 - protein, 280 aa, Homo Sapiens
MAPRKGSSRVAKTNSLRRRKLASFLKDFDREVEIRIKQIESDRQNLLKEVDNLYNIEILRLPKALREMNWLDYFALGGNKQALEEAATADLDITEINKLTAEAIQTPLKSAKTRKVIQVDEMIVEEEEEEENERKNLQTARVKRCPPSKKRTQSIQGKGKGKRSSRANTVTPAVGRLEVSMVKPTPGLTPRFDSRVFKTPGLRTPAAGERIYNISGNGSPLADSKEIFLTVPVGGGESLRLLASDLQRHSIAQLDPEALGNIKKLSNRLAQICSSIRTHK

SEQ ID NO: 4809 - protein, 1374 aa, Homo Sapiens
MMQGNTCHRMSFHPGRGCPRGRGGHGARPSAPSFRPQNLRLLHPQQPPVQYQYEPPSAPSTTFSNSPAPNFLPPRPDFVPFPPPMPPSAQGPLPPCPIRPPFPNHQMRHPFPVPPCFPPMPPPMPCPNNPPVPGAPPGQGTFPFMMPPPSMPHPPPPPVMPQQVNYQYPPGYSHHNFPPPSFNSFQNNPSSFLPSANNSSSPHFRHLPPYPLPKAPSERRSPERLKHYDDHRHRDHSHGRGERHRSLDRRERGRSPDRRRQDSRYRSDYDRGRTPSRHRSYERSRERERERHRHRDNRRSPSLERSYKKEYKRSGRSYGLSVVPEPAGCTPELPGEIIKNTDSWAPPLEIVNHRSPSREKKRARWEEEKDRWSDNQSSGKDKNYTSIKEKEPEETMPDKNEEEEEELLKPVWIRCTHSENYYSSDPMDQVGDSTVVGTSRLRDLYDKFEEELGSRQEKAKAARPPWEPPKTKLDEDLESSSESECESDEDSTCSSSSDSEVFDVIAEIKRKKAHPDRLHDELWYNDPGQMNDGPLCKCSAKARRTGIRHSIYPGEEAIKPCRPMTNNAGRLFHYRITVSPPTNFLTDRPTVIEYDDHEYIFEGFSMFAHAPLTNIPLCKVIRFNIDYTIHFIEEMMPENFCVKGLELFSLFLFRDILELYDWNLKGPLFEDSPPCCPRFHFMPRFVRFLPDGGKEVLSMHQILLYLLRCSKALVPEEEIANMLQWEELEWQKYAEECKGMIVTNPGTKPSSVRIDQLDREQFNPDVITFPIIVHFGIRPAQLSYAGDPQYQKLWKSYVKLRHLLANSPKVKQTDKQKLAQREEALQKIRQKNTMRREVTVELSSQGFWKTGIRSDVCQHAMMLPVLTHHIRYHQCLMHLDKLIGYTFQDRCLLQLAMTHPSHHLNFGMNPDHARNSLSNCGIRQPKYGDRKVHHMHMRKKGINTLINIMSRLGQDDPTPSRINHNERLEFLGDAVVEFLTSVHLYYLFPSLEEGGLATYRTAIVQNQHLAMLAKKLELDPFMLYAHGPDLCRESDLRHAMANCFEALIGAVYLEGSLEEAKQLFGRLLFNDPDLREVWLNYPLHPLQLQEPNTDRQLIETSPVLQKLTEFEEAIGVIFTHVRLLARAFTLRTVGFNHLTLGHNQRMEFLGDSIMQLVATEYLFIHFPDHHEGHLTLLRSSLVNNRTQAKVAEELGMQEYAITNDKTKRPVALRTKTLADLLESFIAALYTDKDLEYVHTFMNVCFFPRLKEFILNQDWNDPKSQLQQCCLTLRTEGKEPDIPLYKTLQTVGPSHARTYTVAVYFKGERIGCGKGPSIQQAEMGAAMDALEKYNFPQMAHQKRFIERKYRQELKEMRWEREHQEREPDETEDIKK

SEQ ID NO: 4810 - protein, 621 aa, Homo Sapiens
MSPVFPMLTVLTMFYYICLRRRARTATRGEMMNTHRAIESNSQTSPLNAEVVQYAKEVVDFSSHYGSENSMSYTMWNLAGVPNVFPSSGDFTQTAVFRTYGTWWDQCPSASLPFKRTPPNFQSQDYVELTFEQQVYPTAVHVLETYHPGAVIRILACSANPYSPNPPAEVRWEILWSERPTKVNASQARQFKPCIKQINFPTNLIRLEVNSSLLEYYTELDAVVLHGVKDKPVLSLKTSLIDMNDIEDDAYAEKDGCGMDSLNKKFSSAVLGEGPNNGYFDKLPYELIQLILNHLTLPDLCRLAQTCKLLSQHCCDPLQYIHLNLQPYWAKLDDTSLEFLQSRCTLVQWLNLSWTGNRGFISVAGFSRFLKVCGSELVRLELSCSHFLNETCLEVISEMCPNLQALNLSSCDKLPPQAFNHIAKLCSLKRLVLYRTKVEQTALLSILNFCSELQHLSLGSCVMIEDYDVIASMIGAKCKKLRTLDLWRCKNITENGIAELASGCPLLEELDLGWCPTLQSSTGCFTRLAHQLPNLQKLFLTANRSVCDTDIDELACNCTRLQQLDILGTRMVSPASLRKLLESCKDLSLLDVSFCSQIDNRAVLELNASFPKVFIKKSFTQ

SEQ ID NO: 4811 - protein, 1013 aa, Homo Sapiens
AHPGKICNRPIDIQATTMDGVNLSTEVVYKKGQDYRFACYDRGRACRSYRVRFLCGKPVRPKLTVTIDTNVNSTILNLEDNVQSWKPGDTLVIASTDYSMYQAEEFQVLPCRSCAPNQVKVAGKPMYLHIGEEIDGVDMRAEVGLLSRNIIVMGEMEDKCYPYRNHICNFFDFDTFGGHIKFALGFKAAHLEGTELKHMGQQLVGQYPIHFHLAGDVDERGGYDPPTYIRDLSIHHTFSRCVTVHGSNGLLIKDVVGYNSLGHCFFTEDGPEERNTFDHCLGLLVKSGTLLPSDRDSKMCKMITEDSYPGYIPKPRQDCNAVSTFWMANPNNNLINCAAAGSEETGFWFIFHHVPTGPSVGMYSPGYSEHIPLGKFYNNRAHSNYRAGMIIDNGVKTTEASAKDKRPFLSIISARYSPHQDADPLKPREPAIIRHFIAYKNQDHGAWLRGGDVWLDSCRFADNGIGLTLASGGTFPYDDGSKQEIKNSLFVGESGNVGTEMMDNRIWGPGGLDHSGRTLPIGQNFPIRGIQLYDGPINIQNCTFRKFVALEGRHTSALAFRLNNAWQSCPHNNVTGIAFEDVPITSRVFFGEPGPWFNQLDMDGDKTSVFHDVDGSVSEYPGSYLTKNDNWLVRHPDCINVPDWRGAICSGCYAQMYIQAYKTSNLRMKIIKNDFPSHPLYLEGALTRSTHYQQYQPVVTLQKGYTIHWDQTAPAELAIWLINFNKGDWIRVGLCYPRGTTFSILSDVHNRLLKQTSKTGVFVRTLQMDKVEQSYPGRSHYYWDEDSGLLFLKLKAQNEREKFAFCSMKGCERIKIKALIPKNAGVSDCTATAYPKFTERAVVDVPMPKKLFGSQLKTKDHFLEVKMESSKQHFFHLWNDFAYIEVDGKKYPSSEDGIQVVVIDGNQGRVVSHTSFRNSILQGIPWQLFNYVATIPDNSIVLMASKGRYVSRGPWTRVLEKLGADRGLKLKEQMAFVGFKGSFRPIWVTLDTEDHKAKIFQVVPIPVVKKKKL

SEQ ID NO: 4812 - protein, 146 aa, Homo Sapiens
MLLWCPPQCACSLGVFPSAPSPVWGTRRSCEPATRVPEVWILSPLLRHGGHTQTQNHTASPRSPVMESPKKKNQQLKVGILHLGSRQKKIRIQLRSQCATWKVICKSCISQTPGINLDLGSGVKVKIIPKEEHCKMPEAGEEQPQV

SEQ ID NO: 4813 - protein, 272 aa, Homo Sapiens
MGNTTSDRVSGERHGAKAARSEGAGGHAPGKEHKIMVGSTDDPSVFSLPDSKLPGDKEFVSWQQDLEDSVKPTQQARPTVIRWSEGGKEVFISGSFNNWSTKIPLIKSHNDFVAILDLPEGEHQYKFFVDGQWVHDPSEPVVTSQLGTINNLIHVKKSDFEVFDALKLDSMESSETSCRDLSSSPPGPYGQEMYAFRSEERFKSPPILPPHLLQVILNKDTNISCDPALLPEPNHVMLNHLYALSIKDSVMVLSATHRYKKKYVTTLLYKPI

SEQ ID NO: 4814 - protein, 1288 aa, Homo Sapiens
MPRKGTQPSTARRREEGPPPPSPDGASSDAEPEPPSGRTESPATAAETASEELDNRSLEEILNSIPPPPPPAMTNEAGAPRLMITHIVNQNFKSYAGEKILGPFHKRFSCIIGPNGSGKSNVIDSMLFVFGYRAQKIRSKKLSVLIHNSDEHKDIQSCTVEVHFQKIIDKEGDDYEVIPNSNFYVSRTACRDNTSVYHISGKKKTFKDVGNLLRSHGIDLDHNRFLILQGEVEQIAMMKPKGQTEHDEGMLEYLEDIIGCGRLNEPIKVLCRRVEILNEHRGDKLNRVKMVEKEKDALEGEKNIAIEFLTLENEIFRKKNHVCQYYIYELQKRIAEMETQKEKIHEDTKEINEKSNILSNEMKAKNKDVKDTEKKLNKITKFIEENKEKFTQLDLEDVQVREKLKHATSKAKKLEKQLQKDKEKVEEFKSIPAKSNNIINETTTRNNALEKEKEKEEKKLKEVMDSLKQETQGLQKEKESREKELMGFSKSVNEARSKMDVAQSELDIYLSRHNTAVSQLTKAKEALIAASETLKERKAAIRDIEGKLPQTEQELKEKEKELQKLTQEETNFKSLVHDLFQKVEEAKSSLAMNRSRGKVLDAIIQEKKSGRIPGIYGRLGDLGAIDEKYDVAISSCCHALDYIVVDSIDIAQECVNFLKRQNIGVATFIGLDKMAVWAKKMTEIQTPENTPRLFDLVKVKDEKIRQAFYFALRDTLVADNLDQATRVAYQKDRRWRVVTLQGQIIEQSGTMTGGGSKVMKGRMGSSLVIEISEEEVNKMESQLQNDSKKAMQIQEQKVQLEERVVKLRHSEREMRNTLEKFTASIQRLIEQEEYLNVQVKELEANVLATAPDKKKQKLLEENVSAFKTEYDAVAEKAGKVEAEVKRLHNTIVEINNHKLKAQQDKLDKINKQLDECASAITKAQVAIKTADRNLQKAQDSVLRTEKEIKDTEKEVDDLTAELKSLEDKAAEVVKNTNAAEESLPEIQKEHRNLLQELKVIQENEHALQKDALSIKLKLEQIDGHIAEHNSKIKYWHKEISKISLHPIEDNPIEEISVLSPEDLEAIKNPDSITNQIALLEARCHEMKPNLGAIAEYKKKEELYLQRVAELDKITYERDSFRQAYEDLRKQRLNEFMAGFYIITNKLKENYQMLTLGGDAELELVDSLDPFSEGIMFSVRPPKKSWKKIFNLSGGEKTLSSLALVFALHHYKPTPLYFMDEIDAALDFKNVSIVAFYIYEQTKNAQFIIISLRNNMFEISDRLIGIYKTYNITKSVAVNPKEIASKGLC

SEQ ID NO: 4815 - protein, 1030 aa, Homo Sapiens
MKIPNIGNVMNKFEILGVVGEGAYGVVLKCRHKETHEIVAIKKFKDSEENEEVKETTLRELKMLRTLKQENIVELKEAFRRRGKLYLVFEYVEKNMLELLEEMPNGVPPEKVKSYIYQLIKAIHWCHKNDIVHRDIKPENLLISHNDVLKLCDFGFARNLSEGNNANYTEYVATRWYRSPELLLGAPYGKSVDMWSVGCILGELSDGQPLFPGESEIDQLFTIQKVLGPLPSEQMKLFYSNPRFHGLRFPAVNHPQSLERRYLGILNSVLLDLMKNLLKLDPADRYLTEQCLNHPTFQTQRLLDRSPSRSAKRKPYHVESSTLSNRNQAGKSTALQSHHRSNSKDIQNLSVGLPRADEGLPANESFLNGNLAGASLSPLHTKTYQASSQPGSTSKDLTNNNIPHLLSPKEAKSKTEFDFNIDPKPSEGPGTKYLKSNSRSQQNRHSFMESSQSKAGTLQPNEKQSRHSYIDTIPQSSRSPSYRTKAKSHGALSDSKSVSNLSEARAQIAEPSTSRYFPSSCLDLNSPTSPTPTRHSDTRTLLSPSGRNNRNEGTLDSRRTTTRHSKTMEELKLPEHMDSSHSHSLSAPHESFSYGLGYTSPFSSQQRPHRHSMYVTRDKVRAKGLDGSLSIGQGMAARANSLQLLSPQPGEQLPPEMTVARSSVKETSREGTSSFHTRQKSEGGVYHDPHSDDGTAPKENRHLYNDPVPRRVGSFYRVPSPRPDNSFHENNVSTRVSSLPSESSSGTNHSKRQPAFDPWKSPENISHSEQLKEKEKQGFFRSMKKKKKKSQTVPNSDSPDLLTLQKSIHSASTPSSRPKEWRPEKISDLQTQSQPLKSLRKLLHLSSASNHPASSDPRFQPLTAQQTKNSFSEIRIHPLSQASGGSSNIRQEPAPKGRPALQLPDGGCDGRRQRHHSGPQDRRFMLRTTEQQGEYFCCGDPKKPHTPCVPNRALHRPISSPAPYPVLQVRGTSMCPTLQVRGTDAFSCPTQQSGFSFFVRHVMREALIHRAQVNQAALLTYHENAALTGK

SEQ ID NO: 4816 - protein, 1500 aa, Homo Sapiens
MTRILTAFKVVRTLKTGFGFTNVTAHQKWKFSRPGIRLLSVKAQTAHIVLEDGTKMKGYSFGHPSSVAGEVVFNTGLGGYPEAITDPAYKGQILTMANPIIGNGGAPDTTALDELGLSKYLESNGIKVSGLLVLDYSKDYNHWLATKSLGQWLQEEKVPAIYGVDTRMLTKIIRDKGTMLGKIEFEGQPVDFVDPNKQNLIAEVSTKDVKVYGKGNPTKVVAVDCGIKNNVIRLLVKRGAEVHLVPWNHDFTKMEYDGILIAGGPGNPALAEPLIQNVRKILESDRKEPLFGISTGNLITGLAAGAKTYKMSMANRGQNQPVLNITNKQAFITAQNHGYALDNTLPAGWKPLFVNVNDQTNEGIMHESKPFFAVQFHPEVTPGPIDTEYLFDSFFSLIKKGKATTITSVLPKPALVASRVEVSKVLILGSGGLSIGQAGEFDYSGSQAVKAMKEENVKTVLMNPNIASVQTNEVGLKQADTVYFLPITPQFVTEVIKAEQPDGLILGMGGQTALNCGVELFKRGVLKEYGVKVLGTSVESIMATEDRQLFSDKLNEINEKIAPSFAVESIEDALKAADTIGYPVMIRSAYALGGLGSGICPNRETLMDLSTKAFAMTNQILVEKSVTGWKEIEYEVVRDADDNCVTVCNMENVDAMGVHTGDSVVVAPAQTLSNAEFQMLRRTSINVVRHLGIVGECNIQFALHPTSMEYCIIEVNARLSRSSALASKATGYPLAFIAAKIALGIPLPEIKNVVSGKTSACFEPSLDYMVTKIPRWDLDRFHGTSSRIGSSMKSVGEVMAIGRTFEESFQKALRMCHPSIEGFTPRLPMNKEWPSNLDLRKELSEPSSTRIYAIAKAIDDNMSLDEIEKLTYIDKWFLYKMRDILNMEKTLKGLNSESMTEETLKRAKEIGFSDKQISKCLGLTEAQTRELRLKKNIHPWVKQIDTLAAEYPSVTNYLYVTYNGQEHDVNFDDHGMMVLGCGPYHIGSSVEFDWCAVSSIRTLRQLGKKTVVVNCNPETVSTDFDECDKLYFEELSLERILDIYHQEACGGCIISVGGQIPNNLAVPLYKNGVKIMGTSPLQIDRAEDRSIFSAVLDELKVAQAPWKAVNTLNEALEFAKSVDYPCLLRPSYVLSGSAMNVVFSEDEMKKFLEEATRVSQEHPVVLTKFVEGAREVEMDAVGKDGRVISHAISEHVEDAGVHSGDATLMLPTQTISQGAIEKVKDATRKIAKAFAISGPFNVQFLVKGNDVLVIECNLRASRSFPFVSKTLGVDFIDVATKVMIGENVDEKHLPTLDHPIIPADYVAIKAPMFSWPRLRDADPILRCEMASTGEVACFGEGIHTAFLKAMLSTGFKIPQKGILIGIQQSFRPRFLGVAEQLHNEGFKLFATEATSDWLNANNVPATPVAWPSQEGQNPSLSSIRKLIRDGSIDLVINLPNNNTKFVHDNYVIRRTAVDSGIPLLTNFQVTKLFAEAVQKSRKVDSKSLFHYRQYSAGKAA

SEQ ID NO: 4817 - protein, 443 aa, Homo Sapiens
MDFPCLWLGLLLPLVAALDFNYHRQEGMEAFLKTVAQNYSSVTHLHSIGKSVKGRNLWVLVVGRFPKEHRIGIPEFKYVANMHGDETVGRELLLHLIDYLVTSDGKDPEITNLINSTRIHIMPSMNPDGFEAVKKPDCYYSIGRENYNQYDLNRNFPDAFEYNNVSRQPETVAVMKWLKTETFVLSANLHGGALVASYPFDNGVQATGALYSRSLTPDDDVFQYLAHTYASRNPNMKKGDECKNKMNFPNGVTNGYSWYPLQGGMQDYNYIWAQCFEITLELSCCKYPREEKLPSFWNNNKASLIEYIKQVHLGVKGQVFDQNGNPLPNVIVEVQDRKHICPYRTNKYGEYYLLLLPGSYIINVTVPGHDPHITKVIIPEKSQNFSALKKDILLPFQGQLDSIPVSNPSCPMIPLYRNLPDHSAATKPSLFLFLVSLLHIFFK

SEQ ID NO: 4818 - protein, 451 aa, Homo Sapiens
MVSRDQAHLGPKYVGLWDFKSRTDEELSFRAGDVFHVARKEEQWWWATLLDEAGGAVAQGYVPHNYLAERETVESEPWFFGCISRSEAVRRLQAEGNATGAFLIRVSEKPSADYVLSVRDTQAVRHYKIWRRAGGRLHLNEAVSFLSLPELVNYHRAQSLSHGLRLAAPCRKHEPEPLPHWDDWERPREEFTLCRKLGSGYFGEVFEGLWKDRVQVAIKVISRDNLLHQQMLQSEIQAMKKLRHKHILALYAVVSVGDPVYIITELMAKGSLLELLRDSDEKVLPVSELLDIAWQVAEGMCYLESQNYIHRDLAARNILVGENTLCKVGDFGLARLIKEDVYLSHDHNIPYKWTAPEALSRGHYSTKSDVWSFGILLHEMFSRGQVPYPGMSNHEAFLRVDAGYRMPCPLECPPSVHKLMLTCWCRDPEQRPCFKALRERLSSFTSYENPT

SEQ ID NO: 4819 - protein, 391 aa, Homo Sapiens
MELVAGCYEQVLFGFAVHPEPKACGDHEQWTLVADFTHHAHTASLSAVAVNSRFVVTGSKDETIHIYDMKKKIEHGALVHHSGTITCLKFYGNRHLISGAEDGLICIWDAKKWECLKSIKAHKGQVTFLSIHPSGKLALSVGTDKTLRTWNLVEGRSAFIKNIKQNAHIVEWSPRGEQYVVIIQNKIDIYQLDTASISGTITNEKRISSVKFLSESVLAVAGDEEVIRFFDCDSLVCLCEFKAHENRVKDMFSFEIPEHHVIVSASSDGFIKMWKLKQDKKVPPSLLCEINTNARLTCLGVWLDKVADMKSLPPAAEPSPVSKEQSKIGKKEPGDTVHKEEKRSKPNTKKRGLTGDSKKATKESGLISTKKRKMVEMLEKKRKKKKIKTMQ

SEQ ID NO: 4820 - protein, 1132 aa, Homo Sapiens
MELFQAKDHYILQQGERALWCSRRDGGLQLRPATDLLLAWNPICLGLVEGVIGKIQLHSDLPWWLILIRQKALVGKLPGDHEVCKVTKIAVLSLSEMEPQDLELELCKKHHFGINKPEKIIPSPDDSKFLLKTFTHIKSNVSAPNKKKVKESKEKEKLERRLLEELLKMFMDSESFYYSLTYDLTNSVQRQSTGERDGRPLWQKVDDRFFWNKYMIQDLTEIGTPDVDFWIIPMIQGFVQIEELVVNYTESSDDEKSSPETPPQESTCVDDIHPRFLVALISRRSRHRAGMRYKRRGVDKNGNVANYVETEQLIHVHNHTLSFVQTRGSVPVFWSQVGYRYNPRPRLDRSEKETVAYFCAHFEEQLNIYKKQVIINLVDQAGREKIIGDAYLKQVLLFNNSHLTYVSFDFHEHCRGMKFENVQTLTDAIYDIILDMKWCWVDEAGVICKQEGIFRVNCMDCLDRTNVVQAAIARVVMEQQLKKLGVMPPEQPLPVKCNRIYQIMWANNGDSISRQYAGTAALKGDFTRTGERKLAGVMKDGVNSANRYYLNRFKDAYRQAVIDLMQGIPVTEDLYSIFTKEKEHEALHKENQRSHQELISQLLQSYMKLLLPDDEKFHGGWALIDCDPSLIDATHRDVDVLLLLSNSAYYVAYYDDEVDKVNQYQRLSLENLEKIEIGPEPTLFGKPKFSCMRLHYRYKEASGYFHTLRAVMRNPEEDGKDTLQCIAEMLQITKQAMGSDLPIIEKKLERKSSKPHEDIIGIRSQNQGSLAQGKNFLMSKFSSLNQKVKQTKSNVNIGNLRKLGNFTKPEMKVNFLKPNLKVNLWKSDSSLETMENTGVMDKVQAESDGDMSSDNDSYHSDEFLTNSKSDEDRQLANSLESVGPIDYVLPSCGIIASAPRLGSRSQSLSSTDSSVHAPSEITVAHGSGLGKGQESPLKKSPSAGDVHILTGFAKPMDIYCHRFVQDAQNKVTHLSETRSVSQQASQERNQMTNQVSNETQSESTEQTPSRPSQLDVSLSATGPQFLSVEPAHSVASQKTPTSASSMLELETGLHVTPSPSESSSSRAVSPFAKIRSSMVQVASITQAGLTHGINFAVSKVQKSPPEPEIINQVQQNELKKMFIQCQTRIIQI

SEQ ID NO: 4821 - protein, 447 aa, Homo Sapiens
MELSQMSELMGLSVLLGLLALMATAAVARGWLRAGEERSGRPACQKANGFPPDKSSGSKKQKQYQRIRKEKPQQHNFTHRLLAAALKSHSGNISCMDFSSNGKYLATCADDRTIRIWSTKDFLQREHRSMRANVELDHATLVRFSPDCRAFIVWLANGDTLRVFKMTKREDGGYTFTATPEDFPKKHKAPVIDIGIANTGKFIMTASSDTTVLIWSLKGQVLSTINTNQMNNTHAAVSPCGRFVASCGFTPDVKVWEVCFGKKGEFQEVVRAFELKGHSAAVHSFAFSNDSRRMASVSKDGTWKLWDTDVEYKKKQDPYLLKTGRFEEAAGAAPCRLALSPNAQVLALASGSSIHLYNTRRGEKEECFERVHGECIANLSFDITGRFLASCGDRAVRLFHNTPGHRAMVEEMQGHLKRASNESTRQRLQQQLTQAQETLKSLGALKK

SEQ ID NO: 4822 - protein, 684 aa, Homo Sapiens
MAGPRACAPLLLLLLLGQLLAAAGAQRVGLPGPPGPPGRPGKPGQDGIDGEAGPPGLPGPPGPKGAPGKPGKPGEAGLPGLPGVDGLTGRDGPPGPKGAPGERGSLGPPGPPGLGGKGLPGPPGEAGVSGPPGGIGLRGPPGPPGLPGLPGPPGPPGPPGHPGVLPEGATDLQCPSICPPGPPGPPGMPGFKGPTGYKGEQGEVGKDGEKGDPGPPGPAGLPGSVGLQGPRGLRGLPGPLGPPGDRGPIGFRGPPGIPGAPGKAGDRGERGPEGFRGPKGDLGRPGPKGTPGVAGPSGEPGMPGKDGQNGVPGLDGQKGEAGRNGAPGEKGPNGLPGLPGRAGSKGEKGERGRAGELGEAGPSGEPGVPGDAGMPGERGEAGHRGSAGALGPQGPPGAPGVRGFQGQKGSMGDPGLPGPQGLRGDVGDRGPGGAEGPKGDQGIAGSDGLPGDKGELGPSGLVGPKGESGSRGELGPKGTQGPNGTSGVQGVPGPPGPLGLQGVPGVPGITGKPGVPGKEASEQRIRELCGGMISEQIAQLAAHLRKPLAPGSIGRPGPAGPPGPPGPPGSIGHPGARGPPGYRGPTGELGDPGPRGNQGDRGDKGAAGAGLDGPEGDQGPQGPQGVPGTSKDGQDGAPGEPGPPGDPGLPGAIGAQGTPGICDTSACQGAVLGGVGEKSGSRSS

SEQ ID NO: 4823 - protein, 284 aa, Homo Sapiens
MSMLPSFGFTQEQVACVCEVLQQGGNLERLGRFLWSLPACDHLHKNESVLKAKAVVAFHRGNFRELYKILESHQFSPHNHPKLQQLWLKAHYVEAEKLRGRPLGAVGKYRVRRKFPLPRTIWDGEETSYCFKEKSRGVLREWYAHNPYPSPREKRELAEATGLTTTQVSNWFKNRRQRDRAAEAKERENTENNNSSSNKQNQLSPLEGGKPLMSSSEEEFSPPQSPDQNSVLLLQGNMGHARSSNYSLPGLTASQPSHGLQTHQHQLQDSLLGPLTSSLVDLGS

SEQ ID NO: 4824 - protein, 1193 aa, Homo Sapiens [sequence omitted]

SEQ ID NO: 4825 - protein, 324 aa, Homo Sapiens
MFPSPALTPTPFSVKDILNLEQQQRSLAAAGELSARLEATLAPSSCMLAAFKPEAYAGPEAAAPGLPELRAELGRAPSPAKCASAFPAAPAFYPRAYSDPDPAKDPRAEKKELCALQKAVELEKTEADNAERPRARRRRKPRVLFSQAQVYELERRFKQQRYLSAPERDQLASVLKLTSTQVKIWFQNRRYKCKRQRQDQTLELVGLPPPPPPPARRIAVPVLVRDGKPCLGDSAPYAPAYGVGLNPYGYNAYPAYPGYGGAACSPGYSCTAAYPAGPSPAQPATAAANNNFVNFGVGDLNAVQSPGIPQSNSGVSTLHGIRAW

SEQ ID NO: 4826 - protein, 567 aa, Homo Sapiens
AVANSRFDFIPRATEKKKKSQTETGKERERTSFLTQGGKRFELQHGLAVICMTLLITGDSIVSAEAVWDHVTMANRELAFKAGDVIKVLDASNKDWWWGQIDDEEGWFPASFVRLWVNQEDEVEEGPSDVQNGHLDPNSDCLCLGRPLQNRDQMRANVINEIMSTERHYIKHLKDICEGYLKQCRKRRDMFSDEQLKVIFGNIEDIYRFQMGFVRDLEKQYNNDDPHLSEIGPCFLEHQDGFWIYSEYCNNHLDACMELSKLMKDSRYQHFFEACRLLQQMIDIAIDGFLLTPVQKICKYPLQLAELLKYTAQDHSDYRYVAAALAVMRNVTQQINERKRRLENIDKIAQWQASVLDWEGEDILDRSSELIYTGEMAWIYQPYGRNQQRVFFLFDHQMVLCKKDLIRRDILYYKGRIDMDKYEVVDIEDGRDDDFNVSMKNAFKLHNKETEEIHLFFAKKLEEKIRWLRAFREERKMVQEDEKIGFEISENQKRQAAMTVRKVPKQKGVNSARSVPPSYPPPQDPLNHGQYLVPDGIAQSQVFEFTEPKRSQSPFWQNFSRLTPFKK

SEQ ID NO: 4827 - protein, 1154 aa, Homo Sapiens
PRAAARGGGGDAGTRGRGFVQAGRGAPMAECGRGGAAGGALPTSPGPALGAKGALKAGVGEGGGGGGRLGHGRARYDSGGVSNGDCSLGVSGDEARASPTRGPRGVALAPTPSAVVCTLPRESKPGGLPRRSSIIKDGTKQKRERKKTVSFSSMPTEKKISSASDCINSMVEGSELKKVRSNSRIYHRYFLLDADMQSLRWEPSKKDSEKAKIDIKSIKEVRTGKNTDIFRSNGISDQISEDCAFSVIYGENYESLDLVANSADVANIWVTGLRYLISYGKHTLDMLESSQDNMRTSWVSQMFSEIDVDNLGHITLCNAVQCIRNLNPGLKTSKIELKFKELHKSKDKAGTEVTKEEFIEVFHELCTRPEIYFLLVQFSSNKEFLDTKDLMMFLEAEQGVAHINEEISLEIIHKYEPSKEGQEKGWLSIDGFTNYLMSPDCYIFDPEHKKVCQDMKQPLSHYFINSSHNTYLIEDQFRGPSDITGYIRALKMGCRSVELDVWDGPDNEPVIYTGHTMTSQIVFRSVIDIINKYAFFASEYPLILCLENHCSIKQQKVMVQHMKKLLGDKLYTTSPNVEESYLPSPDVLKGKILIKAKKLSSNCSGVEGDVTDEDEGAEMSQRMGKENMEQPNNVPVKRFQLCKELSELVSICKSVQFKEFQVSFQVQKYWEVCSFNEVLASKYANENPGDFVNYNKRFLARVFPSPMRIDSSNMNPQDFWKCGCQIVAMNFQTPGLMMDLNIGWFRQNGNCGYVLRPAIMREEVSFFSANTKDSVPGVSPQLLHIKIISGQNFPKPKGSGAKGDVVDPYVYVEIHGIPADCAEQRTKTVHQNGDAPIFDESFEFQINLPELAMVRFVVLDDDYIGDEFIGQYTIPFECLQTGYRHVPLQSLTGEVLAHASLFVHVAITNRRGGGKPHKRGLSVRKGKKSREYASLRTLWIKTVDEVFKNAQPPIRDATDLRENMQNAVVSFKELCGLSSVANLMQCMLAVSPRFLGPDNTPLVVLNLSEQYPTMELQGIVPEVLKKIVTTYDMMIQSLKALIENADAVYEKIVHCQKAAMEFHEHLHSIGTKEGLKERKLQKAVESFTWNITILKGQADLLKYAKNETLENLKQIHFAAVSCGLNKPGTENADVQKPRRSLEVIPEKANDETGE

SEQ ID NO: 4828 - protein, 181 aa, Homo Sapiens
SLRISAIILHPNYDPILLDADIAILKLLDKARISTRVQPICLAASRDLSTSFQESHITVAGWNVLADVRSPGFKNDTLRSGVVSVVDSLLCEEQHEDHGIPVSVTDNMFCASWEPTAPSDICTAETGGIAAVSFPGRASPEPRWHLMGLVSWSYDKTCSHRLSTAFTKVLPFKDWIERNMK

SEQ ID NO: 4829 - protein, 647 aa, Homo Sapiens [sequence omitted]

SEQ ID NO: 4830 - protein, 459 aa, Homo Sapiens
MSNCLQNFLKITSTRLLCSRLCQQLRSKRKFFGTVPISRLHRRVVITGIGLVTPLGVGTHLVWDRLIGGESGIVSLVGEEYKSIPCSVAAYVPRGSDEGQFNEQNFVSKSDIKSMSSPTIMAIGAAELAMKDSGWHPQSEADQVATGVAIGMGMIPLEVVSETALNFQTKGYNKVSPFFVPKILVNMAAGQVSIRYKLKGPNHAVSTACTTGAHAVGDSFRFIAHGDADVMVAGGTDSCISPLSLAGFSRARALSTNSDPKLACRPFHPKRDGFVMGEGAAVLVLEEYEHAVQRRARIYAEVLGYGLSGDAGHITAPDPEGEGALRCMAAALKDAGVQPEEISYINAHATSTPLGDAAENKAIKHLFKDHAYALAVSSTKGATGHLLGAAGAVEAAFTTLACYYQKLPPTLNLDCSEPEFDLNYVPLKAQEWKTEKRFIGLTNSFGFGGTNATLCIAGL

SEQ ID NO: 4831 - protein, 1087 aa, Homo Sapiens
MDLYSTPAAALDRFVARRLQPRKEFVEKARRALGALAAALRERGGRLGAAAPRVLKTVKGGSSGRGTALKGGCDSELVIFLDCFKSYVDQRARRAEILSEMRASLESWWQNPVPGLRLTFPEQSVPGALQFRLTSVDLEDWMDVSLVPAFNVLGQAGSAVKPKPQVYSTLLNSGCQGGEHAACFTELRRNFVNIRPAKLKNLILLVKHWYHQVCLQGLWKETLPPVYALELLTIFAWEQGCKKDAFSLGEGLRTVLGLIQQHQHLCVFWTVNYGFEDPAVGQFLQRHVKRPRPVILDPADPTWDLGNGAAWHWDLHAQEAASCYDHPCFLRGMGDPVQSWKGPGLPRAGCSGLGHPIQLDPNQKTPENSKSLNAVYPRAGSKPPSCPAPGPTAEPASYPSVPGMALDLSQIPTKELDRFIQDHLKPSPQFQEQVKKAIDIILRCLHENCVHKASRVSKGGSFGRGTDLRDGCDVELIIFLNCFTDYKDQGPRRAEILDEMRAHVESWWQDQVPSLSLQFPEQNVPEALQFQLVSTALKSWTDVSLLPAFDAVGQLSSGTKPNPQVYSRLLTSGCQEGEHKACFAELRRNFMNIRPVKLKNLILLVKHWYRQVAAQNKGKGPAPASLPPAYALELLTIFAWEQGCRQDCFNMAQGFRTVLGLVQQHQQLCVYWTVNYSTEDPAMRMHLLGQLRKPRPLVLDPADPTWNVGHGSWELLAQEAAALGMQACFLSRDGTSVQPWDVMPALLYQTPAGDLDKFISEFLQPNRQFLAQVNKAVDTICSFLKENCFRNSPIKVIKVVKGGSSAKGTALRGRSDADLVVFLSCFSQFTEQGNKRAEIISEIRAQLEACQQERQFEVKFEVSKWENPRVLSFSLTSQTMLDQSVDFDVLPAFDALGQLVSGSRPSSQVYVDLIHSYSNAGEYSTCFTELQRDFIISRPTKLKSLIRLVKHWYQQCTKISKGRGSLPPQHGLELLTVYAWEQGGKDSQFNMAEGFRTVLELVTQYRQLCIYWTINYNAKDKTVGDFLKQQLQKPRPIILDPADPTGNLGHNARWDLLAKEAAACTSALCCMGRNGIPIQPWPVKAAV

SEQ ID NO: 4832 - protein, 141 aa, Homo Sapiens
MAQYLSTLLLLLATLAVALAWSPKEEDRIIPGGIYNADLNDEWVQRALHFAISEYNKATKDDYYRRPLRVLRARQQTVGGVNYFFDVEVGRTICTKSQPNLDTCAFHEQPELQKKQLCSFEIYEVPWENRRSLVKSRCQES

SEQ ID NO: 4833 - protein, 170 aa, Homo Sapiens
MSHRTSSTFRAERSFHSSSSSSSSSTSSSASRALPAQDPPMEKALSMFSDDFGSFMRPHSEPLAFPARPGGAGNIKTLGDAYEFAVDVRDFSPEDIIVTTSNNHIEVRAEKLAADGTVMNTFAHKCQLPEDVDPTSVTSALREDGSLTIRARRHPHTEHVQQTFRTEIKI

SEQ ID NO: 4834 - protein, 282 aa, Homo Sapiens
MQRLRWLRDWKSSGRGLTAAKEPGARSSPLQAMRILQLILLALATGLVGGETRIIKGFECKPHSQPWQAALFEKTRLLCGATLIAPRWLLTAAHCLKPRYIVHLGQHNLQKEEGCEQTRTATESFPHPGFNNSLPNKDHRNDIMLVKMASPVSITWAVRPLTLSSRCVTAGTSCLISGWGSTSSPQLRLPHTLRCANITIIEHQKCENAYPGNITDTMVCASVQEGGKDSCQGDSGGPLVCNQSLQGIISWGQDPCAITRKPGVYTKVCKYVDWIQETMKNN

SEQ ID NO: 4835 - protein, 1523 aa, Homo Sapiens
MAPGWAGVGAAVRARLALALALASVLSGPPAVACPTKCTCSAASVDCHGLGLRAVPRGIPRNAERLDLDRNNITRITKMDFAGLKNLRVLHLEDNQVSVIERGAFQDLKQLERLRLNKNKLQVLPELLFQSTPKLTRLDLSENQIQGIPRKAFRGITDVKNLQLDNNHISCIEDGAFRALRDLEILTLNNNNISRILVTSFNHMPKIRTLRLHSNHLYCDCHLAWLSDWLRQRRTVGQFTLCMAPVHLRGFNVADVQKKEYVCPAPHSEPPSCNANSISCPSPCTCSNNIVDCRGKGLMEIPANLPEGIVEIRLEQNSIKAIPAGAFTQYKKLKRIDISKNQISDIAPDAFQGLKSLTSLVLYGNKITEIAKGLFDGLVSLQLLLLNANKINCLRVNTFQDLQNLNLLSLYDNKLQTISKGLFAPLQSIQTLHLAQNPFVCDCHLKWLADYLQDNPIETSGARCSSPRRLANKRISQIKSKKFRCSGSEDYRSRFSSECFMDLVCPEKCRCEGTIVDCSNQKLVRIPSHLPEYVTDLRLNDNEVSVLEATGIFKKLPNLRKINLSNNKIKEVREGAFDGAASVQELMLTGNQLETVHGRVFRGLSGLKTLMLRSNLIGCVSNDTFAGLSSVRLLSLYDNRITTITPGAFTTLVSLSTINLLSNPFNCNCHLAWLGKWLRKRRIVSGNPRCQKPFFLKEIPIQDVAIQDFTCDGNEESSCQLSPRCPEQCTCMETVVRCSNKGLRALPRGMPKDVTELYLEGNHLTAVPRELSALRHLTLIDLSNNSISMLTNYTFSNMSHLSTLILSYNRLRCIPVHAFNGLRSLRVLTLHGNDISSVPEGSFNDLTSLSHLALGTNPLHCDCSLRWLSEWVKAGYKEPGIARCSSPEPMADRLLLTTPTHRFQCKGPVDINIVAKCNACLSSPCKNNGTCTQDPVELYRCACPYSYKGKDCTVPINTCIQNPCQHGGTCHLSDSHKDGFSCSCPLGFEGQRCEINPDDCEDNDCENNATCVDGINNYVCICPPNYTGELCDEVIDHCVPELNLCQHEAKCIPLDKGFSCECVPGYSGKLCETDNDDCVAHKCRHGAQCVDTINGYTCTCPQGFSGPFCEHPPPMVLLQTSPCDQYECQNGAQCIVVQQEPTCRCPPGFAGPRCEKLITVNFVGKDSYVELASAKVRPQANISLQVATDKDNGILLYKGDNDPLALELYQGHVRLVYDSLSSPPTTVYSVETVNDGQFHSVELVTLNQTLNLVVDKGTPKSLGKLQKQPAVGINSPLYLGGIPTSTGLSALRQGTDRPLGGFHGCIHEVRINNELQDFKALPPQSLGVSPGCKSCTVCKHGLCRSVEKDSVVCECRPGWTGPLCDQEARDPCLGHRCHHGKCVATGTSYMCKCAEGYGGDLCDNKNDSANACSAFKCHHGQCHISDQGEPYCLCQPGFSGEHCQQENPCLGQVVREVIRRQKGYASCATASKVPIMECRGGCGPQCCQPTRSKRRKYVFQCTDGSSFVEEVERHLECGCLACS

SEQ ID NO: 4836 - protein, 373 aa, Homo Sapiens
RVGRPPLPPRPTHPRRKPLPPNNVTGKPGSAGIISSGPITTPPLRSTPRPTGTPLERIETDIKQPTVPASGEELENITDFSSSPTRETDPLGKPRFKGPHVRYIQKPDNSPCSITDSVKRFPKEEATEGNATSPPQNPPTNLTVVTVEGCPSFVILDWEKPLNDTVTEYEVISRENGSFSGKNKSIQMTNQTFSTVENLKPNTSYEFQVKPKNPLGEGPVSNTVAFSTESADPRVSEPVSAGRDAIWTERPFNSDSYSECKGKQYVKRTWYKKFVGVQLCNSLRYKIYLSDSLTGKFYNIGDQRGHGEDHCQFVDSFLDGRTGQQLTSDQLPIKEGYFRAVRQEPVQFGEIGGHTQINYVQWYECGTTIPGKW

SEQ ID NO: 4837 - protein, 501 aa, Homo Sapiens
MSETEFHHGAQAGLELLRSSNSPTSASQSAGMTVTDQAFVTLATNDIYCQGALVLGQSLRRHRLTRKLVVLITPQVSSLLRVILSKVFDEVIEVNLIDSADYIHLAFLKRPELGLTLTKLHCWTLTHYSKCVFLDADTLVLSNVDELFDRGEFSAAPDPGWPDCFNSGVFVFQPSLHTHKLLLQHAMEHGSFDGADQGLLNSFFRNWSTTDIHKHLPFIYNLSSNTMYTYSPAFKQFGSSAKVVHFLGSMKPWNYKYNPQSGSVLEQGSVSSSQHQAAFLHLWWTVYQNNVLPLYKSVQAGEARASPGHTLCHSDVGGPCADSASGVGEPCENSTPSAGVPCANSPLGSNQPAQGLPEPTQIVDETLSLPEGRRSEDMIACPETETPAVITCDPLSQPSPQPADFTETETILQPANKVESVSSEETFEPSQELPAEALRDPSLQDALEVDLAVSVSQISIEEKVKELSPEEERRKWEEGRIDYMGKDAFARIQEKLDRFLQ

SEQ ID NO: 4838 - protein, 280 aa, Homo Sapiens
MELRPWLLWVVAATGTLVLLAADAQGQKVFTNTWAVRIPGGPAVANSVARKHGFLNLGQIFGDYYHFWHRGVTKRSLSPHRPRHSRLQREPQVQWLEQQVAKRRTKRDVYQEPTDPKFPQQWYLSGVTQRDLNVKAAWAQGYTGHGIVVSILDDGIEKNHPDLAGNYDPGASFDVNDQDPDPQPRYTQMNDNRHGTRCAGEVAAVANNGVCGVGVAYNARIGGVRMLDGEVTDAVEARSLGLNPNHIHIYSASWGPEDDGKTVDGPARLAEEAFFRGVSQ

SEQ ID NO: 4839 - protein, 463 aa, Homo Sapiens
MQYNLRLRSQMVMKMREYLCNLHGFVDIETPTLFKRTPGGAKEFLVPSREPGKFCSLPQSPQQFKQLLMVGGLDRYFQVARCYRDEGSRPDRQPEFTQIDIEMSFVDQTGIQSLIEGLLQYSWPNDKDPVVVPFPTMTFAEVLATYGTDKPDTRFGMKIIDISDVFRNTEIGFLQDALSKPHGTVKAICIPEGAKYLKRKDIESIRNFAADHFNQEILPVFLNANRNWNSPVANFIMESQRLELIRLMETQEEDVVLLTAGEHNKACSLLGKLRLECADLLETRGVVLRDPTLFSFLWVVDFPLFLPKEESPRELESAHHPFTAPHPSDIHLLYTEPKKARSQHYDLVLNGNEIGGGSIRIHNAELQRYILATLLKEDVKMLSHLLQALDYGAPPHGGIALGLDRLICLVTGSPSIRDVIAFPKSFRGHDLMSNTPDSVPPEELKPYHIRVSKPTDSKAERAH

SEQ ID NO: 4840 - protein, 312 aa, Homo Sapiens
MAAQKINEGLEHLAKAEKYLKTGFLKWKPDYDSAASEYGKAAVAFKNAKQFEQAKDACLREAVAHENNRALFHAAKAYEQAGMMLKEMQKLPEAVQLIEKASMMYLENGTPDTAAMALERAGKLIENVDPEKAVQLYQQTANVFENEERLRQAVELLGKASRLLVRGRRFDEAALSIQKEKNIYKEIENYPTCYKKTIAQVLVHLHRNDYVAAERCVRESYSIPGFNGSEDCAALEQLLEGYDQQDQDQVSDVCNSPLFKYMDNDYAKLGLSLVVPGGGIKKKSPATPQAKPDGVTATAADEEEDEYSGGLC

SEQ ID NO: 4841 - protein, 553 aa, Homo Sapiens
MAFEDVAVYFSQEEWGLLDTAQRALYRRVMLDNFALVASLGLSTSRPRVVIQLERGEEPWVPSGTDTTLSRTTYRRRNPGSWSLTEDRDVSGEWPRAFPDTPPGMTTSVFPVAGACHSVKSLQRQRGASPSRERKPTGVSVIYWERLLLGSGSGQASVSLRLTSPLRPPEGVRLREKTLTEHALLGRQPRTPERQKPCAQEVPGRTFGSAQDLEAAGGRGHHRMGAVWQEPHRLLGGQEPSTWDELGEALHAGEKSFECRACSKVFVKSSDLLKHLRTHTGERPYECAQCGKAFSQTSHLTQHQRIHSGETPYACPVCGKAFRHSSSLVRHQRIHTAEKSFRCSECGKAFSHGSNLSQHRKIHAGGRPYACAQCGRRFCRNSHLIQHERTHTGEKPFVCALCGAAFSQGSSLFKHQRVHTGEKPFACPQCGRAFSHSSNLTQHQLLHTGERPFRCVDCGKAFAKGAVLLSHRRIHTGEKPFVCTQCGRAFRERPALFHHQRIHTGEKTVRRSRASLHPQARSVAGASSEGAPAKETEPTPASGPAAVSQPAEV

SEQ ID NO: 4842 - protein, 450 aa, Homo Sapiens
MLWKITDNVKYEEDCEDRHDGSSNGNPRVPHLSSAGQHLYSPAPPLSHTGVAEYQPPPYFPPPYQQLAYSQSADPYSHLGEAYAAAINPLHQPAPTGSQQQAWPGRQSQEGAGLPSHHGRPAGLLPHLSGLEAGAVSARRDAYRRSDLLLPHAHALDAAGLAENLGLHDMPHQMDEVQNVDDQHLLLHDQTVIRKGPISMTKNPLNLPCQKELVGAVMNPTEVFCSVPGRLSLLSSTSKYKVTVAEVQRRLSPPECLNASLLGGVLRRAKSKNGGRSLREKLDKIGLNLPAGRRKAAHVTLLTSLVEGEAVHLARDFAYVCEAEFPSKPVAEYLTRPHLGGRNEMAARKNMLLAAQQLCKEFTELLSQDRTPHGTSRLAPVLETNIQNCLSHFSLITHGFGSQAICAAVSALQNYIKEALIVIDKSYMNPGDQSPADSNKTLEKMEKHRK

SEQ ID NO: 4843 - protein, 669 aa, Homo Sapiens
MARRGWRRAPLRRGVGSSPRARRLMRPLWLLLAVGVFDWAGASDGGGGEARAMDEEIVSEKQAEESHRQDSANLLIFILLLTLTILTIWLFKHRRARFLHETGLAMIYGLLVGLVLRYGIHVPSDVNNVTLSCEVQSSPTTLLVTFDPEVFFNILLPPIIFYAGYSLKRRHFFRNLGSILAYAFLGTAISCFVIGSIMYGCVTLMKVTGQLAGDFYFTDCLLFGAIVSATDPVTVLAIFHELQVDVELYALLFGESVLNDAVAIVLSSSIVAYQPAGDNSHTFDVTAMFKSIGIFLGIFSGSFAMGAATGVVTALVTKFTKLREFQLLETGLFFLMSWSTFLLAEAWGFTGVVAVLFCGITQAHYTYNNLSTESQHRTKQLFELLNFLAENFIFSYMGLTLFTFQNHVFNPTFVVGAFVAIFLGRAANIYPLSLLLNLGRRSKIGSNFQHMMMFAGLRGAMAFALAIRDTATYARQMMFSTTLLIVFFTVWVFGGGTTAMLSCLHIRVGVDSDQEHLGVPENERRTTKAESAWLFRMWYNFDHNYLKPLLTHSGPPLTTTLPACCGPIARCLTSPQAYENQEQLKDDDSDLILNDGDISLTYGDSTVNTEPATSSAPRRFMGNSSEDALDRELAFGDHELVIRGTRLVLPMDDSEPPLNLLDNTRHGPA

SEQ ID NO: 4844 - protein, 395 aa, Homo Sapiens
MAVTDSLSRAATVLATVLLLSFGSVAASHIEDQAEQFFRSGHTNNWAVLVCTSRFWFNYRHVANTLSVYRSVKRLGIPDSHIVLMLADDMACNPRNPKPATVFSHKNMELNVYGDDVEVDYRSYEVTVENFLRVLTGRIPPSTPRSKRLLSDDRSNILIYMTGHGGNGFLKFQDSEEITNIELADAFEQMWQKRRYNELLFIIDTCQGASMYERFYSPNIMALASSQVGEDSLSHQPDPAIGVHLMDRYTFYVLEFLEEINPASQTNMNDLFQVCPKSLCVSTPGHRTDLFQRDPKNVLITDFFGSVRKVEITTETIKLQQDSEIMESSYKEDQMDEKLMEPLKYAEQLPVAQIIHQKPKLKDWHPPGGFILGLWALIIMVFFKTYGIKHMKFIF

SEQ ID NO: 4845 - protein, 1918 aa, Homo Sapiens
QTNLITMTTYNVLFEILIEQIGTQVIHKQHPDPDSSVKIQNPQILKVIATLLRNSPQCPESMEVRRAFLSDMIKLFNNSRENRRSLLQCSVWQEWMLSLCYFNPKNSDEQKITEMVYAIFRILLYHAVKYEWGGWRVWVDTLSITHSKVTFEIHKENLANIFREQQGKVDEEIGLCSSTSVQAASGIRRDINVSVGSQQPDTKDSPVCPHFTTNGNENSSIEKTSSLESASNIELQTTNTSYEEMKAEQENQELPDEGTLEETLTNETRNADDLEVSSDIIEAVAISSNSFITTGKDSMTVSEVTASISSPSEEDASEMPEFLDKSIVEEEEDDDYVELKVEGSPTEEANLPTELQDNSLSPAASEAGEKLDMFGNDDKLIFQEGKPVTEKQTDTETQDSKDSGIQTMTASGSSAMSPETTVSQIAVESDLGQMLEEGKKATNLTRETKLINDCHGSVSEASSEQKIAKLDVSNVATDTERLELKASPNVEAPQPHRHVLEISRQHEQPGQGIAPDAVNGQRRDSRSTVFRIPEFNWSQMHQRLLTDLLFSIETDIQMWRSHSTKTVMDFVNSSDNVIFVHNTIHLISQVMDNMVMACGGILPLLSAATSATHELENIEPTQGLSIEASVTFLQRLISLVDVLIFASSLGFTEIEAEKSMSSGGILRQCLRLVCAVAVRNCLECQQHSQLKTRGDKALKPMHSLIPLGKSAAKSPVDIVTGGISPVRDLDRLLQDMDINRLRAVVFRDIEDSKQAQFLALAVVYFISVLMVSKYRDILEPQNERHSQSCTETGSENENVSLSEITPAAFSTLTTASVEESESTSSARRRDSGIGEETATGLGSHVEVTPHTAPPGVSAGPDAISEVLSTLSLEVNKSPETKNDRGNDLDTKATPSVSVSKNVNVKDILRSLVNIPADGVTVDPALLPPACLGALGDLSVEQPVQFRSFDRSVIVAAKKSAVSPSTFNTSIPTNAVSVVSSVDSAQASDMGGESPGSRSSNAKLPSVPTVDSVSQDPVSNMSITERLEHALEKAAPLLREIFVDFAPFLSRTLLGSHGQELLIEGTSLVCMKSSSSVVELVMLLCSQEWQNSIQKNAGLAFIELVNEGRLLSQTMKDHLVRVANEAEFILSRQRAEDIHRHAEFESLCAQYSADKREDEKMCDHLIRAAKYRDHVTATQLIQKIINILTDKHGAWGNSAVSRPLEFWRLDYWEDDLRRRRRFVRNPLGSTHPEATLKTAVEHVCIFKLRENSKATDEDILAKGKQSIRSQALGNQNSENEILLEGDDDTLSSVDEKDLENLAGPVSLSTPAQLVAPSVVVKGTLSVTSSELYFEVDEEDPNFKKIDPKILAYTEGLHGKWLFTEIRSIFSRRYLLQNTALEIFMANRVAVMFNFPDPATVKKVVNFLPRVGVGTSFGLPQTRRISLASPRQLFKASNMTQRWQHREISNFEYLMFLNTIAGRSYNDLNQYPVFPWVITNYESEELDLTLPTNFRDLSKPIGALNPKRAAFFAERYESWEDDQVPKFHYGTHYSTASFVLAWLLRIEPFTTYFLNLQGGKFDHADRTFSSISRAWRNSQRDTSDIKELIPEFYYLPEMFVNFNNYNLGVMDDGTVVSDVELPPWAKTSEEFVHINRLALESEFVSCQLHQWIDLIFGYKQQGPEAVRALNVFYYLTYEGAVNLNSITDPVLREAVEAQIRSFGQTPSQLLIEPHPPRGSAMQVSPLMFTDKAQQDVIMVLKFPSNSPVTHVAANTQPGLATPAVITVTANRLFAVNKWHNLPAHQGAVQDQPYQLPVEIDPLIASNTGMHRRQITDLLDQSIQVHSQCFVITSDNRYILVCGFWDKSFRVYSTDTGRLIQVVFGHWDVVTCLARSESYIGGNCYILSGSRDATLLLWYWNGNAVGLEITQAVRLLLLGPF

SEQ ID NO: 4846 - protein, 459 aa, Homo Sapiens
MAPLCPSPWLPLLIPAPAPGLTVQLLLSLLLLMPVHPQRLPRMQEDSPLGGGSSGEDDPLGEEDLPSEEDSPREEDPPGEEDLPGEEDLPGEEDLPEVKPKSEEEGSLKLEDLPTVEAPGDPQEPQNNAHRDKEGDDQSHWRYGGDPPWPRVSPACAGRFQSPVDIRPQLAAFCPALRPLELLGFQLPPLPELRLRNNGHSVQLTLPPGLEMALGPGREYRALQLHLHWGAAGRPGSEHTVEGHRFPAEIHVVHLSTAFARVDEALGRPGGLAVLAAFLEEGPEENSAYEQLLSRLEEIAEEGSETQVPGLDISALLPSDFSRYFQYEGSLTTPPCAQGVIWTVFNQTVMLSAKQLHTLSDTLWGPGDSRLQLNFRATQPLNGRVIEASFPAGVDSSPRAAEPVQLNSCLAAGDILALVFGLLFAVTSVAFLVQMRRQHRRGTKGGVSYRPAEVAETGA

SEQ ID NO: 4847 - protein, 784 aa, Homo Sapiens
MPHTLWMVWVLGVIISLSKEESSNQASLSCDRNGICKGSSGSLNSIPSGLTEAVKSLDLSNNRITYISNSDLQRCVNLQALVLTSNGINTIEEDSFSSLGSLEHLDLSYNYLSNLSSSWFKPLSSLTFLNLLGNPYKTLGETSLFSHLTKLQILRVGNMDTFTKIQRKDFAGLTFLEELEIDASDLQSYEPKSLKSIQNVSHLILHMKQHILLLEIFVDVTSSVECLELRDTDLDTFHFSELSTGETNSLIKKFTFRNVKITDESLFQVMKLLNQISGLLELEFDDCTLNGVGNFRASDNDRVIDPGKVETLTIRRLHIPRFYLFYDLSTLYSLTERVKRITVENSKVFLVPCLLSQHLKSLEYLDLSENLMVEEYLKNSACEDAWPSLQTLILRQNHLASLEKTGETLLTLKNLTNIDISKNSFHSMPETCQWPEKMKYLNLSSTRIHSVTGCIPKTLEILDVSNNNLNLFSLNLPQLKELYISRNKLMTLPDASLLPMLLVLKISRNAITTFSKEQLDSFHTLKTLEAGGNNFICSCEFLSFTQEQQALAKVLIDWPANYLCDSPSHVRGQQVQDVRLSVSECHRTALVSGMCCALFLLILLTGVLCHRFHGLWYMKMMWAWLQAKRKPRKAPSRNICYDAFVSYSERDAYWVENLMVQELENFNPPFKLCLHKRDFIPGKWIIDNIIDSIEKSHKTVFVLSENFVKSEWCKYELDFSHFRLFDENNDAAILILLEPIEKKAIPQRFCKLRKIMNTKTYLEWPMDEAQREGFWVNLRAAIKS

SEQ ID NO: 4848 - protein, 539 aa, Homo Sapiens
MAAALRVAAVGARLSVLASGLRAAVRSLCSQATSVNERIENKRRTALLGGGQRRIDAQHKRGKLTARERISLLLDPGSFVESDMFVEHRCADFGMAADKNKFPGDSVVTGRGRINGRLVYVFSQDFTVFGGSLSGAHAQKICKIMDQAITVGAPVIGLNDSGGARIQEGVESLAGYADIFLRNVTASGVIPQISLIMGPCAGGAVYSPALTDFTFMVKDTSYLFITGPDVVKSVTNEDVTQEELGGAKTHTTMSGVAHRAFENDVDALCNLRDFFNYLPLSSQDPASVRECHDPSDRLVPELDTIVPLESTKAYNMVDIIHSVVDEREFFEIMPNYAKNIIVGFARMNGRTVGIVGNQPKVASGCLDINSSVKGARFVRFCDAFNIPLITFVDVPGFLPGTAQEYGGIIRHGAKLLYAFAEATVPKVTVITRKAYGGAYDVMSSKHLCGDTNYAWPTAEIAVMGAKGAVEIIFKGHENVEAAQAEYIEKFANPFPAAVRGFVDDIIQPSSTRARICCDLDVLASKKVQRPWRKHANIPL

SEQ ID NO: 4849 - protein, 706 aa, Homo Sapiens
MAVPAALIPPTQLVPPQPPISTSASSSGTTTSTSSATSSPAPSIGPPASSGPTLFRPEPIASAAAAAATVTSTGGGGGGGGSGGGGGSSGNGGGGGGGGGGSNCNPNLAAASNGSGGGGGGISAGGGVASSTPINASTGSSSSSSSSSSSSSSSSSSSSSSSSCGPLPGKPVYSTPSPVENTPQNNECKMVDLRGAKVASFTVEGCELICLPQAFDLFLKHLVGGLHTVYTKLKRLEITPVVCNVEQVRILRGLGAIQPGVNRCKLISRKDFETLYNDCTNASSRPGRPPKRTQSVTSPENSHIMPHSVPGLMSPGIIPPTGLTAAAAAAAAATNAAIAEAMKVKKIKLEAMSNYHASNNQHGADSENGDMNSSVGLELPFMMMPHPLIPVSLPPASVTMAMSQMNHLSTIANMAAAAQVQSPPSRVETSVIKERVPDSPSPAPSLEEGRRPGSHPSSHRSSSVSSSPARTESSSDRIPVHQNGLSMNQMLMGLSPNVLPGPKEGDLAGHDMGHESKRMHIEKDETPLSTPTARDSLDKLSLTGHGQPLPPGFPSPFLFPDGLSSIETLLTNIQGLLKVAIDNARAQEKQVQLEKTELKMDFLRERELRETLEKQLAMEQKNRAIVQKRLKKEKKAKRKLQEALEFETKRREQAEQTLKQAASTDSLRVLNDSLTPEIEADRSGGRTDAERTIQDGRLYLKTTVMY

SEQ ID NO: 4850 - protein, 422 aa, Homo Sapiens
MSSSCSGLSRVLVAVATALVSASSPCPQAWGPPGVQYGQPGRSVKLCCPGVTAGDPVSWFRDGEPKLLQGPDSGLGHELVLAQADSTDEGTYICQTLDGALGGTVTLQLGYPPARPVVSCQAADYENFSCTWSPSQISGLPTRYLTSYRKKTVLGADSQRRSPSTGPWPCPQDPLGAARCVVHGAEFWSQYRINVTEVNPLGASTRLLDVSLQSILRPDPPQGLRVESVPGYPRRLRASWTYPASWPCQPHFLLKFRLQYRPAQHPAWSTVEPAGLEEVITDAVAGLPHAVRVSARDFLDAGTWSTWSPEAWGTPSTGTIPKEIPAWGQLHTQPEVEPQVDSPAPPRPSLQPHPRLLDHRDSVEQVAVLASLGILSFLGLVAGALALGLWLRLRRGGKDGSPKPGFLASVIPVDRRPGAPNL

SEQ ID NO: 4851 - protein, 824 aa, Homo Sapiens
MRQSLLFLTSVVPFVLAPRPPDDPGFGPHQRLEKLDSLLSDYDILSLSNIQQHSVRKRDLQTSTHVETLLTFSALKRHFKLYLTSSTERFSQNFKVVVVDGKNESEYTAKWQDFFTGHVVGEPDSRVLAHIRDDDVIIRINTDGAEYNIEPLWRFVNDTKDKRMLVYKSEDIKNVSRLQSPKVCGYLKVDNEELLPKGLVDREPPEELVHRVKRRADPDPMKNTCKLLVVADHRFYRYMGRGEESTTTNYLIELIDRVDDIYRNTSWDNAGFKGYGIQIEQIRILKSPQEVKPGEKHYNMAKSYPNEEKDAWDVKMLLEQFSFDIAEEASKVCLAHLFTYQDFDMGTLGLAYVGSPRANSHGGVCPKAYYSPVGKKNIYLNSGLTSTKNYGKTILTKEADLVTTHELGHNFGAEHDPDGLAECAPNEDQGGKYVMYPIAVSGDHENNKMFSNCSKQSIYKTIESKAQECFQERSNKVCGNSRVDEGEECDPGIMYLNNDTCCNSDCTLKEGVQCSDRNSPCCKNCQFETAQKKCQEAINATCKGVSYCTGNSSECPPPGNAENDTVCLDLGKCKDGKCIPFCEREQQLESCACNETDNSCKVCCRDLSGRCVPYVDAEQKNLFLRKGKPCTVGFCDMNGKCEKRVQDVIERFWDFIDQLSINTFGKFLADNIVGSVLVFSLIFWIPFSILVHCVDKKLDKQYESLSLFHPSNVEMLSSMDSASVRIIKPFPAPQTPGRLQPAPVIPSAPAAPKLDHQRMDTIQEDPSTDSHMDEDGFEKDPFPNSSTAAKSFEDLTDHPVARSEKAASFKLQRQNRVNSKETEC

SEQ ID NO: 4852 - protein, 202 aa, Homo Sapiens
MELWGAYLLLCLFSLLTQVTTEPPTQKPKKIVNAKKDVVNTKMFEELKSRLDTLAQEVALLKEQQALQTVCLKGTKVHMKCFLAFTQTKTFHEASEDCISRGGTLSTPQTGSENDALYEYLRQSVGNEAEIWLGLNDMAAEGTWVDMTGARIAYKNWETEITAQPDGGKTENCAVLSGAANGKWFDKRCRDQLPYICQFGIV

SEQ ID NO: 4853 - protein, 574 aa, Homo Sapiens
MALARGSRQLGALVWGACLCVLVHGQQAQPGQGSDPARWRQLIQWENNGQVYSLLNSGSEYVPAGPQRSESSSRVLLAGAPQAQQRRSHGSPRRRQAPSLPLPGRVGSDTVRGQARHPFGFGQVPDNWREVAVGDSTGMALARTSVSQQRHGGSASSVSASAFASTYRQQPSYPQQFPYPQAPFVSQYENYDPASRTYDQGFVYYRPAGGGVGAGAAAVASAGVIYPYQPRARYEEYGGGEELPEYPPQGFYPAPERPYVPPPPPPPDGLDRRYSHSLYSEGTPGFEQAYPDPGPEAAQAHGGDPRLGWYPPYANPPPEAYGPPRALEPPYLPVRSSDTPPPGGERNGAQQGRLSVGSVYRPNQNGRGLPDLVPDPNYVQASTYVQRAHLYSLRCAAEEKCLASTAYAPEATDYDVRVLLRFPQRVKNQGTADFLPNRPRHTWEWHSCHQHYHSMDEFSHYDLLDAATGKKVAEGHKASFCLEDSTCDFGNLKRYACTSHTQGLSPGCYDTYNADIDCQWIDITDVQPGNYILKVHVNPKYIVLESDFTNNVVRCNIHYTGRYVSATNCKIVQS

SEQ ID NO: 4854 - protein, 173 aa, Homo Sapiens
MADVLDLHEAGGEDFAMDEDGDESIHKLKEKAKKRKGRGFGSEGSRARMREDYDSVEQDGDEPGPQRSVEGWILFVTGVHEEATEEDIHDKFAEYGEIKNIHLNLDRRTGYLKGYTLVEYETYKEAQAAMEGLNGQDLMGQPISVDWCFVRGPPKGKRRGGRRRSRSPDRRRR

SEQ ID NO: 4855 - protein, 672 aa, Homo Sapiens
MGVGRLDMYVLHPPSAGAERTLASVCALLVWHPAGPGEKVVRVLFPGCTPPACLLDGLVRLQHLRFLREPVVTPQDLEGPGRAESKESVGSRDSSKREGLLATHPRPGQERPGVARKEPARAEAPRKTEKEAKTPRELKKDPKPSVSRTQPREVRRAASSVPNLKKTNAQAAPKPRKAPSTSHSGFPPVANGPRSPPSLRCGEASPPSAACGSPASQLVATPSLELGPIPAGEEKALELPLAASSIPRPRTPSPESHRSPAEGSERLSLSPLRGGEAGPDASPTVTTPTVTTPSLPAEVGSPHSTEVDESLSVSFEQVLPPSAPTSEAGLSLPLRGPRARRSASPHDVDLCLVSPCEFEHRKAVPMAPAPASPGSSNDSSARSQERAGGLGAEETPPTSVSESLPTLSDSDPVPLAPGAADSDEDTEGFGVPRHDPLPDPLKVPPPLPDPSSICMVDPEMLPPKTARQTENVSRTRKPLARPNSRAAAPKATPVAAAKTKGLAGGDRASRPLSARSEPSEKGGRAPLSRKSSTPKTATRGPSGSASSRPGVSATPPKSPVYLDLAYLPSGSSAHLVDEEFFQRVRALCYVISGQDQRKEEGMRAVLDALLASKQHWDRDLQVTLIPTFDSVAMHTWYAETHARHQALGITVLGSNGMVSMQDDAFPACKVEF

SEQ ID NO: 4856 - protein, 348 aa, Homo Sapiens
MVRGQVFDVGPRYTNLSYIGEGAYGMVCSAYDNVNKVRVAIKKISPFEHQTYCQRTLREIKILLRFRHENIIGINDIIRAPTIEQMKDVYIVQDLMETDLYKLLKTQHLSNDHICYFLYQILRGLKYIHSANVLHRDLKPSNLLLNTTCDLKICDFGLARVADPDHDHTGFLTEYVATRWYRAPEIMLNSKGYTKSIDIWSVGCILAEMLSNRPIFPGKHYLDQLNHILGILGSPSQEDLNCIINLKARNYLLSLPHKNKVPWNRLFPNADSKALDLLDKMLTFNPHKRIEVEQALAHPYLEQYYDPSDEPIAEAPFKFDMELDDLPKEKLKELIFEETARFQPGYRS

SEQ ID NO: 4857 - protein, 433 aa, Homo Sapiens
MRAEGLGGLERFCSPGKGRGLRALQPFQVGDLLFSCPAYAYVLTVNERGNHCEYCFTRKEGLSKCGRCKQAFYCNVECQKEDWPMHKLECSPMVVFGENWNPSETVRLTARILAKQKIHPERTPSEKLLAVKEFESHLDKLDNEKKDLIQSDIAALHHFYSKHLEFPDNDSLVVLFAQVNCNGFTIEDEELSHLGSAIFPDVALMNHSCCPNVIVTYKGTLAEVRAVQEIKPGEEVFTSYIDLLYPTEDRNDRLRDSYFFTCECQECTTKDKDKAKVEIRKLSDPPKAEAIRDMVRYARNVIEEFRRAKHYKSPSELLEICELSQEKMSSVFEDSNVYMLHMMYQAMGVCLYMQDWEGALQYGQKIIKPYSKHYPLYSLNVASMWLKLGRLYMGLEHKAAGEKALKKAIAIMEVAHGKDHPYISEIKQEIESH

SEQ ID NO: 4858 - protein, 747 aa, Homo Sapiens
MRRSLAPSQLAKRKPEGRSCDDEDWQPGLVTPRKRKSSSETQIQECFLSPFRKPLSQLTNQPPCLDSSQHEAFIRSILSKPFKVPIPNYQGPLGSRALGLKRAGVRRALHDPLEKDALVLYEPPPLSAHDQLKLDKEKLPVHVVVDPILSKVLRPHQREGVKFLWECVTSRRIPGSHGCIMADEMGLGKTLQCITLMWTLLRQSPECKPEIDKAVVVSPSSLVKNWYNEVGKWLGGRIQPLAIDGGSKDEIDQKLEGFMNQRGARVSSPILIISYETFRLHVGVLQKGSVGLVICDEGHRLKNSENQTYQALDSLNTSRRVLISGTPIQNDLLEYFSLVHFVNSGILGTAHEFKKHFELPILKGRDAAASEADRQLGEERLRELTSIVNRCLIRRTSDILSKYLPVKIEQVVCCRLTPLQTELYKRFLRQAKPAEELLEGKMSVSSLSSITSLKKLCNHPALIYDKCVEEEDGFVGALDLFPPGYSSKALEPQLSGKMLVLDYILAVTRSRSSDKVVLVSNYTQTLDLFEKLCRARRYLYVRLDGTMSIKKRAKVVERFNSPSSPDFVFMLSSKAGGCGLNLIGANRLVMFDPDWNPANDEQAMARVWRDGQKKTCYIYRLLSAGTIEEKIFQRQSHKKALSSCVVDEEQDVERHFSLGELKELFILDEASLSDTHDRLHCRRCVNSRQIRPPPDGSDCTSDLAGWNHCTDKWGLRDEVLQAAWDAASTAITFVFHQHSHEEQRGLR

SEQ ID NO: 4859 - protein, 892 aa, Homo Sapiens
GGDEQVRDAAAVPAGLPRLEGGDKTLREPGAGAQEVTLKVHISDASTHQPVADALIEIFTNQASIASGTSGTDGVAFIKFQYKLGSQLIVTASKHAYVPNSAPWKPIRLPVFSSLSLGLLPERSATLMVYEDVVQIVSGFQGARPQPRVHFQRRALRLPENTSYSDLTAFLTAASSPSEVDSFPYLRGLDGNGTGNSTRHDLTPVTAVSVHLLSSNGTPVLVDGPIYVTVPLATQSSLRHNAYVAAWRFDQKLGTWLKSGLGLVHQEGSQLTWTYIAPQLGYWVAAMSPPIPGPVVTQDITTYHTVFLLAILGGMAFILLVLLCLLLYYCRRKCLKPRQHHRKLQLPAGLESSKRDQSTSMSHINLLFSRRASEFPGPLSVTSHGRPEAPGTKELMSGVHLEMMSPGGEGDLHTPMLKLSYSTSQEFSSREELLSCKEEDKSQISFDNLTPSGTLGKDYHKSVEVFSLKARKSMEREGYESSGMMTTGVVTTPCSHSLYLKSRTEKVQPPREANSPFRNICTPRLHHLRKNSCWTADPLNVMMSRSVDHLERPTSFPRPGQLICCSSVDQVNDSVYRKVLPALVIPAHYMKLPGDHSYVSQPLVVPADQQLEIERLQAELSNPHAGIFPHPSSQIQPQPLSSQAISQQHLQDAGTREWSPQNASMSESLSIPASLNDAALAQMNSEVQLLTEKALMELGGGKPLPHTRAWFVSLDGRSNAHVRHSYIDLQRAGRNGSNDASLDSGVDMNEPKSARKGRGDALSLQQNYPPVQEHQQKEPRAPDSTAYTQLVYLDDVEQSGSECGTTVCTPEDSALRCLLEGSSRRSGGQLPSLQEETTRRTADAPSEPAASPHQRRSAHEEEEDDDDDDQGEDKKSPWQKREERPLMAFNIK

SEQ ID NO: 4860 - protein, 520 aa, Homo Sapiens
MRNKKILKEDELLSETQQAAFHQIAMEPFEINVPKPKRRNGVNFSLAVVVIYLILLTAGAGLLVVQVLNLQARLRVLEMYFLNDTLAAEDSPSFSLLQSAHPGEHLAQGASRLQVLQAQLTWVRVSHEHLLQRVDNFTQNPGMFRIKGEQGAPGLQGHKGAMGMPGAPGPPGPPAEKGAKGAMGRDGATGPSGPQGPPGVKGEAGLQGPQGAPGKQGATGTPGPQGEKGSKGDGGLIGPKGETGTKGEKGDLGLPGSKGDRGMKGDAGVMGPPGAQGSKGDFGRPGPPGLAGFPGAKGDQGQPGLQGVPGPPGAVGHPGAKGEPGSAGSPGRAGLPGSPGSPGATGLKGSKGDTGLQGQQGRKGESGVPGPAGVKGEQGSPGLAGPKGAPGQAGQKGDQGVKGSSGEQGVKGEKGERGENSVSVRIVGSSNRGRAEVYYSGTWGTICDDEWQNSDAIVFCRMLGYSKGRALYKVGAGTGQIWLDNVQCRGTESTLWSCTKNSWGHHDCSHEEDAGVECSV

SEQ ID NO: 4861 - protein, 1290 aa, Homo Sapiens
MSGPLEGADGGGDPRPGESFCPGGVPSPGPPQHRPCPGPSLADDTDANSNGSSGNESNGHESRGASQRSSHSSSSGNGKDSALLETTESSKSTNSQSPSPPSSSIAYSLLSASSEQDNPSTSGCSSEQSARARTQKELMTALRELKLRLPPERRGKGRSGTLATLQYALACVKQVQANQEYYQQWSLEEGEPCSMDMSTYTLEELEHITSEYTLQNQDTFSVAVSFLTGRIVYISEQAAVLLRCKRDVFRGTRFSELLAPQDVGVFYGSTAPSRLPTWGTGASAGSGLRDFTQEKSVFCRIRGGPDRDPGPRYQPFRLTPYVTKIRVSDGAPAQPCCLLIAERIHSGYEAPRIPPDKRIFTTRHTPSCLFQDVDERAAPLLGYLPQDLLGAPVLLFLHPEDRPLMLAIHKKILQLAGQPFDHSPIRFCARNGEYVTMDTSWAGFVHPWSRKVAFVLGRHKVRTAPLNEDVFTPPAPSPAPSLDTDIQELSEQIHRLLLQPVHSPSPTGLCGVGAVTSPGPLHSPGSSSDSNGGDAEGPGPPAPVTFQQICKDVHLVKHQGQQLFIESRARPQSRPRLPATGTFKAKALPCQSPDPELEAGSAPVQAPLALVPEEAERKEASSCSYQQINCLDSILRYLESCNLPSTTKRKCASSSSYTTSSASDDDRQRTGPVSVGTKKDPPSAALSGEGATPRKEPVVGGTLSPLALANKAESVVSVTSQCSFSSTIVHVGDKKPPESDIIMMEDLPGLAPGPAPSPAPSPTVAPDPAPDAYRPVGLTKAVLSLHTQKEEQAFLSRFRDLGRLRGLDSSSTAPSALGERGCHHGPAPPSRRHHCRSKAKRSRHHQNPRAEAPCYVSHPSPVPPSTPWPTPPATTPFPAVVQPYPLPVFSPRGGPQPLPPAPTSVPPAAFPAPLVTPMVALVLPNYLFPTPSSYPYGALQTPAEGPPTPASHSPSPSLPALPPSPPHRPDSPLFNSRCSSPLQLNLLQLEELPRAEGAAVAGGPGSSAGPPPPSAEAAEPEARLAEVTESSNQDALSGSSDLLELLLQEDSRSGTGSAASGSLGSGLGSGSGSGSHEGGSTSASITRSSQSSHTSKYFGSIDSSEAEAGAARGGAEPGDQVIKYVLQDPIWLLMANADQRVMMTYQVPSRDMTSVLKQDRERLRAMQKQQPRFSEDQRRELGAVHSWVRKGQLPRALDVMACVDCGSSTQDPGHPDDPLFSELDGLGLEPMEEGGGEQGSSGGGSGEGEGCEEAQGGAKASSSQDLAMEEEEEGRSSSSPALPTAGNCTS

SEQ ID NO: 4862 - protein, 713 aa, Homo Sapiens
MLCVGRLGGLGARAAALPPRRAGRGSLEAGIRARRVSTSWSPVGAAFNVKPQGSRLDLFGERARLFGVPELSAPEGFHIAQEKALRKTELLVDRACSTPPGPQTVLIFDELSDSLCRVADLADFVKIAHPEPAFREAAEEACRSIGTMVEKLNTNVDLYQSLQKLLADKKLVDSLDPETRRVAELFMFDFEISGIHLDKQKRKRAVDLNVKILDLSSTFLMGTNFPNKIEKHLLPEHIRRNFTSAGDHIIIDGLHAESPDDLVREAAYKIFLYPNAGQLKCLEELLSSRDLLAKLVGYSTFSHRALQGTIAKNPETVMQFLEKLSDKLSERTLKDFEMIRGMKMKLNAQNSEVMPWDPPYYSGVIRAERYNIEPSLYCPFFSLGACMEGLNILLNRLLGISLYAEQPAKGEVWSEDVRKLAVVHESEGLLGYIYCDFFQRADKPHQDCHFTIRGGRLKEDGDYQLPLVVLMLNLPRSSRSSPTLLTPGMMENLFHEMGHAMHSMLGRTRYQHVTGTRCPTDFAEVPSILMEYFANDYRVVNQFARHYQTGQPLPKNMVSRLCESKKVCAAADMQLQVFYATLDQIYHGKHPLRNSTTDILKETQEKFYGLPYVPNTAWQLRFSHLVGYGARYYSYLMSRAVASMVWKECFLQDPFNRAAGERYRREMLAHGGGREPMLMVEGMLQKCPSVDDFVSALVSDLDLDFETFLMDSE

SEQ ID NO: 4863 - protein, 1047 aa, Homo Sapiens
MMAAEAGSEEGGPVTAGAGGGGAAAGSSAYPAVCRVKIPAALPVAAAPYPGLVETGVAGTLGGGAALGSEFLGAGSVAGALGGAGLTGGGTAAGVAGAAAGVAGAAVAGPSGDMALTKLPTSLLAETLGPGGGFPPLPPPPYLPPLGAGLGTVDEGDSLDGPEYEEEEVAIPLTAPPTNQWYHGKLDRTIAEERLRQAGKSGSYLIRESDRRPGSFVLSFLSQMNVVNHFRIIAMCGDYYIGGRRFSSLSDLIGYYSHVSCLLKGEKLLYPVAPPEPVEDRRRVRAILPYTKVPDTDEISFLKGDMFIVHNELEDGWMWVTNLRTDEQGLIVEDLVEEVGREEDPHEGKIWFHGKISKQEAYNLLMTVGQVCSFLVRPSDNTPGDYSLYFRTNENIQRFKICPTPNNQFMMGGRYYNSIGDIIDHYRKEQIVEGYYLKEPVPMQDQEQVLNDTVDGKEIYNTIRRKTKDAFYKNIVKKGYLLKKGKGKRWKNLYFILEGSDAQLIYFESEKRATKPKGLIDLSVCSVYVVHDSLFGRPNCFQIVVQHFSEEHYIFYFAGETPEQAEDWMKGLQAFCNLRKSSPGTSNKRLRQVSSLVLHIEEAHKLPVKHFTNPYCNIYLNSVQVAKTHAREGQNPVWSEEFVFDDLPPDINRFEITLSNKTKKSKDPDILFMRCQLSRLQKGHATDEWFLLSSHIPLKGIEPGSLRVRARYSMEKIMPEEEYSEFKELILQKELHVVYALSHVCGQDRTLLASILLRIFLHEKLESLLLCTLNDREISMEDEATTLFRATTLASTLMEQYMKATATQFVHHALKDSILKIMESKQSCELSPSKLEKNEDVNTNLTHLLNILSELVEKIFMASEILPPTLRYIYGCLQKSVQHKWPTNTTMRTRVVSGFVFLRLICPAILNPRMFNIISDSPSPIAARTLILVAKSVQNLANLVEFGAKEPYMEGVNPFIKSNKHRMIMFLDELGNVPELPDTTEHSRTDLSRDLAALHEICVAHSDELRTLSNERGAQQHVLKKLLAITELLQQKQNQYTKTNDVR

SEQ ID NO: 4864 - protein, 522 aa, Homo Sapiens
MEFPDHSRHLLQCLSEQRHQGFLCDCTVLVGDAQFRAHRAVLASCSMYFHLFYKDQLDKRDIVHLNSDIVTAPAFALLLEFMYEGKLQFKDLPIEDVLAAASYLHMYDIVKVCKKKLKEKATTEADSTKKEEDASSCSDKVESLSDGSSHIAGDLPSDEDEGEDEKLNILPSKRDLAAEPGNMWMRLPSDSAGIPQAGGEAEPHATAAGKTVASPCSSTESLSQRSVTSVRDSADVDCVLDLSVKSSLSGVENLNSSYFSSQDVLRSNLVQVKVEKEASCDESDVGTNDYDMEHSTVKESVSTNNRVQYEPAHLAPLREDSVLRELDREDKASDDEMMTPESERVQVEGGMESSLLPYVSNILSPAGQIFMCPLCNKVFPSPHILQIHLSTHFREQDGIRSKPAADVNVPTCSLCGKTFSCMYTLKRHERTHSGEKPYTCTQCGKSFQYSHNLSRHAVVHTREKPHACKWCERRFTQSGDLYRHIRKFHCELVNSLSVKSEALSLPTVRDWTLEDSSQELWK

SEQ ID NO: 4865 - protein, 213 aa, Homo Sapiens
MAALLRAVRRFRGKAVWEGPLHGLWCCSGQEDPKRWVGSSSPISKEKLPNAETEKFWMFYRFDAIRTFGFLSRLKLAQTALTVVALPPGYYLYSQGLLTLNTVCLMSGISGFALTMLCWMSYFLRRLVGILYLNESGTMLRVAHLNFWGWRQDTYCPMADVIPLTETKDRPQEMFVRIQRYSGKQTFYVTLRYGRILDRERFTQVFGVHQMLK

SEQ ID NO: 4866 - protein, 348 aa, Homo Sapiens
MGARGAPSRRRQAGRRLRYLPTGSFPFLLLLLLLCIQLGGGQKKKENLLAEKVEQLMEWSSRRSIFRMNGDKFRKFIKAPPRNYSMIVMFTALQPQRQCSVCRQANEEYQILANSWRYSSAFCNKLFFSMVDYDEGTDVFQQLNMNSAPTFMHFPPKGRPKRADTFDLQRIGFAAEQLAKWIADRTDVHIRVFRPPNYSGTIALALLVSLVGGLLYLRRNNLEFIYNKTGWAMVSLCIVFAMTSGQMWNHIRGPPYAHKNPHNGQVSYIHGSSQAQFVAESHIILVLNAAITMGMVLLNEAATSKGDVGKRRIICLVGLGLVVFFFSFLLSIFRSKYHGYPYSDLDFE

SEQ ID NO: 4867 - protein, 314 aa, Homo Sapiens
MGARGALLLALLLARAGLRKPESQEAAPLSGPCGRRVITSRIVGGEDAELGRWPWQGSLRLWDSHVCGVSLLSHRWALTAAHCFETYSDLSDPSGWMVQFGQLTSMPSFWSLQAYYTRYFVSNIYLSPRYLGNSPYDIALVKLSAPVTYTKHIQPICLQASTFEFENRTDCWVTGWGYIKEDEALPSPHTLQEVQVAIINNSMCNHLFLKYSFRKDIFGDMVCAGNAQGGKDACFGDSGGPLACNKNGLWYQIGVVSWGVGCGRPNRPGVYTNISHHFEWIQKLMAQSGMSQPDPSWPLLFFPLLWALPLLGPV

SEQ ID NO: 4868 - protein, 626 aa, Homo Sapiens
MVDVVGLERETGPRGSPWPGLPLPSLVGPAPLLTCLCPQCLSVEDALGLGEPEGSGLPPGPVLEARYVARLSAAAVLYLSNPEGTCEDARAGLWASHADHLLALLESPKALTPGLSWLLQRMQARAAGQTPKTACVDIPQLLEEAVGAGAPGSAGGVLAALLDHVRSGSCFHALPSPQYFVDFVFQQHSSEVPMTLAELSALMQRLGVGREAHSDHSHRHRGASSRDPVPLISSSNSSSVWDTVCLSARDVMAAYGLSEQAGVTPEAWAQLSPALLQQQLSGAYTSQSRPPVQDQLSQSERYLYGSLATLLICLCAVFGLLLLTCTGCRGVAHYILQTFLSLAVGALTGDAVLHLTPKVLGLHTHSEEGLSPQPTWRLLAMLAGLYAFFLFENLFNLLLPRDPEDLEDGPCGHSSHSHGGHSHGVSLQLAPSELRQPKPPHEGSRADLVAEESPELLNPEPRRLSPELRLLPYMITLGDAVHNFADGLAVGAAFASSWKTGLATSLAVFCHELPHELGDFAALLHAGLSVRQALLLNLASALTAFAGLTWHSRLESARRARPGSWQWPPACSLRSTLRHAPGDVESTGPAAPGSSSCCTTWACWAAGPSCCCCPCTRMTSPSDTLP

SEQ ID NO: 4869 - protein, 146 aa, Homo Sapiens [sequence omitted]

SEQ ID NO: 4870 - protein, 402 aa, Homo Sapiens
MTALPGPLWLLGLALCALGGGGPGLRPPPGCPQRRLGARERRDVQREILAVLGLPGRPRPRAPPAASRLPASAPLFMLDLYHAMAGDDDEDGAPAERRLGRADLVMSFVNMVERDRALGHQEPHWKEFRFDLTQIPAGEAVTAAEFRIYKVPSIHLLNRTLHVSMFQVVQEQSNRESDLFFLDLQTLRAGDEGWLVLDVTAASDCWLLKRHKDLGLRLYVETEDGHSVDPGLAGLLGQRAPRSQQPFVVTFFRASPSPIRTPRAVRPLRRRQPKKSNELPQANRLPGIFDDVHGSHGRQVCRRHELYVSFQDLGWLDWVIAPQGYSAYYCEGECSFPLDSCMNATNHAILQSLVHLMMPDAVPKACCAPTKLSATSVLYYDSSNNVILRKHRNMVVKACGCH

SEQ ID NO: 4871 - protein, 142 aa, Homo Sapiens
MRFFVPLFLVGILFPAILAKQFTKCELSQLLKDIDGYGGIALPELICTMFHTSGYDTQAIVENNESTEYGLFQISNKLWCKSSQVPQSRNICDISCDKFLDDDITDDIMCAKKILDIKGIDYWLAHKALCTEKLEQWLCEKL

SEQ ID NO: 4872 - protein, 538 aa, Homo Sapiens
MNLELLESFGQNYPEEADGTLDCISMALTCTFNRWGTLLAVGCNDGRIVIWDFLTRGIAKIISAHIHPVCSLCWSRDGHKLVSASTDNIVSQWDVLSGDCDQRFRFPSPILKVQYHPRDQNKVLVCPMKSAPVMLTLSDSKHVVLPVDDDSDLNVVASFDRRGEYIYTGNAKGKILVLKTDSQDLVASFRVTTGTSNTTAIKSIEFARKGSCFLINTADRIIRVYDGREILTCGRDGEPEPMQELQDLVNRTPWKKCCFSGDGEYIVAGSARQHALYIWEKSIGNLVKILHGTRGELLLDVAWHPVRPIIASISSGVVSIWAQNQVENWSAFAPDFKELDENVEYEERESGFDIEDEDKSEPEQTGADAAEDEEVDVTSVDPIAAFCSSDEELEDSKALLYLPIAPEVEDPEENPYGPPPDAVQTSLMDEGASSEKKRQSSADGSQPPKKKPKTTNIELQGVPNDEVHPLLGVKGDGKSKKKQAGRPKGSKGKEKDSPFKPKLYKGDRGLPLEGSAKGKVQAELSQPLTAGGAISELL

SEQ ID NO: 4873 - protein, 663 aa, Homo Sapiens
MLQMPKLNEIPPGRAGRREARGEGRWPGQTGPEAARLEWRAQGQAGGARAPWDSWGSSRLPTQPGPGWSRCPPSLLCALSFQKSTMESKDEVSDTDSGIILQSGPDSPVSPMKELTHAVHKQQRALEARLEACLEELRRLCLREAELTGTLPAEYPLKPGEKAPKVRRRIGAAYKLDDWALHREDPLSSLERQLALQLQITEAARRLCLEENLSRQARRQRKHSMLQEEKKLQELQRCLVERRRNSEPPPAAALPLGRELSASDDSSLSDGLLLEEEESQVPKPPPESPAPPSRPLPPQTLEGLQPTGPEAGSPERAPVQNSPWKETSLDHPYEKPRKSSEPWSESSSPATTPQDGPSASSLWLLEPASYHVVPIRGVPGQWQGRTSAPATPEIQGRRGQSQSLRVDSFRAGPEGRGRSAFPRRRPTHYTVTVPDSCFPATKPPLPHAACHSCSEDSGSDVSSISHPTSPGSSSPDISFLQPLSPPKTHRHRGAWVPAGSRELVAHHPKLLLPPGYFPAGRYVVVAESPLPPGEWELCRAAPGPAYEEEGTPLRYQRLVPSRSRIVRTPSLKDSPAGRGLSKAAVSEELKWWHERARLRSTRPHSLDRQGAFRVRSLPLGREGFGRALGPRAQVPTVCVLWRSPDGAPVQVFVPEKGEIISQV

SEQ ID NO: 4874 - protein, 190 aa, Homo Sapiens
MDHSHHMGMSYMDSNSTMQPSHHHPTTSASHSHGGGDSSMMMMPMTFYFGFKNVELLFSGLVINTAGEMAGAFVAVFLLAMFYEGLKIARESLLRKSQVSIRYNSMPVPGPNGTILMETHKTVGQQMLSFPHLLQTVLHIIQVVISYFLMLIFMTYNGYLCIAVAAGAGTGYFLFSWKKAVVVDITEHCH

SEQ ID NO: 4875 - protein, 873 aa, Homo Sapiens
MGTSALWALWLLLALCWAPRESGATGTGRKAKCEPSQFQCTNGRCITLLWKCDGDEDCVDGSDEKNCVKKTCAESDFVCNNGQCVPSRWKCDGDPDCEDGSDESPEQCHMRTCRIHEISCGAHSTQCIPVSWRCDGENDCDSGEDEENCGNITCSPDEFTCSSGRCISRNFVCNGQDDCSDGSDELDCAPPTCGAHEFQCSTSSCIPISWVCDDDADCSDQSDESLEQCGRQPVIHTKCPASEIQCGSGECIHKKWRCDGDPDCKDGSDEVNCPSRTCRPDQFECEDGSCIHGSRQCNGIRDCVDGSDEVNCKNVNQCLGPGKFKCRSGECIDISKVCNQEQDCRDWSDEPLKECHINECLVNNGGCSHICKDLVIGYECDCAAGFELIDRKTCGDIDECQNPGICSQICINLKGGYKCECSRGYQMDLATGVCKAVGKEPSLIFTNRRDIRKIGLERKEYIQLVEQLRNTVALDADIAAQKLFWADLSQKAIFSASIDDKVGRHVKMIDNVYNPAAIAVDWVYKTIYWTDAASKTISVATLDGTKRKFLFNSDLREPASIAVDPLSGFVYWSDWGEPAKIEKAGMNGFDRRPLVTADIQWPNGITLDLIKSRLYWLDSKLHMLSSVDLNGQDRRIVLKSLEFLAHPLALTIFEDRVYWIDGENEAVYGANKFTGSELATLVNNLNDAQDIIVYHELVQPSGKNWCEEDMENGGCEYLCLPAPQINDHSPKYTCSCPSGYNVEENGRDCQSTATTVTYSETKDTNTTEISATSGLVPGGINVTTAVSEVSVPPKGTSAAWAILPLLLLVMAAVGGYLMWRNWQHKNMKSMNFDNPVYLKTTEEDLSIDIGRHSASVGHTYPAISVVSTDDDLA

SEQ ID NO: 4876 - protein, 191 aa, Homo Sapiens
MNFLLSWVHWSLALLLYLHHAKWSQAAPMAEGGGQNHHEVVKFMDVYQRSYCHPIETLVDIFQEYPDEIEYIFKPSCVPLMRCGGCSNDEGLECVPTEESNITMQIMRIKPHQGQHIGEMSFLQHNKCECRPKKDRARQENPCGPCSERRKHLFVQDPQTCKCSCKNTHSRCKARQLELNERTCRCDKPRR

SEQ ID NO: 4877 - protein, 1782 aa, Homo Sapiens
MGAGSSTEQRSPEQPPEGSSTPAEPEPSGGGPSAEAAPDTTADPAIAASDPATKLLQKNGQLSTINGVAEQDELSLQEGDLNGQKGALNGQGALNSQEEEEVIVTEVGQRDSEDVSKRDSDKEMATKSAVVHDITDDGQEETPEIIEQIPSSESNLEELTQPTESQANDIGFKKVFKFVGFKFTVKKDKTEKPDTVQLLTVKKDEGEGAAGAGDHKDPSLGAGEAASKESEPKQSTEKPEETLKREQSHAEISPPAESGQAVEECKEEGEEKQEKEPSKSAESPTSPVTSETGSTFKKFFTQGWAGWRKKTSFRKPKEDEVEASEKKKEQEPEKVDTEEDGKAEVASEKLTASEQAHPQEPAESAHEPRLSAEYEKVELPSEEQVSGSQGPSEEKPAPLATEVFDEKIEVHQEEVVAEVHVSTVEERTEEQKTEVEETAGSVPAEELVEMDAEPQEAEPAKELVKLKETCVSGEDPTQGADLSPDEKVLSKPPEGVVSEVEMLSSQERMKVQGSPLKKLFTSTGLKKLSGKKQKGKRGGGDEESGEHTQVPADSPDSQEEQKGESSASSPEEPEEITCLEKGLAEVQQDGEAEEGATSDGEKKREGVTPWASFKKMVTPKKRVRRPSESDKEDELDKVKSATLSSTESTASEMQEEMKGSVEEPKPEEPKRKVDTSVSWEALICVGSSKKRARRGSSSDEEGGPKAMGGDHQKADEAGKDKETGTDGILAGSQEHDPGQGSSSPEQAGSPTEGEGVSTWESFKRLVTPRKKSKSKLEEKSEDSIAGSGVEHSTPDTEPGKEESWVSIKKFIPGRRKKRPDGKQEQAPVEDAGPTGANEDDSDVPAVVPLSEYDAVEREKMEAQQAQKSAEQPEQKAATEVSKELSESQVHMMAAAVADGTRAATIIEERSPSWISASVTEPLEQVEAEAALLTEEVLEREVIAEEEPPTVTEPLPENREARGDTVVSEAELTPEAVTAAETAGPLGAEEGTEASAAEETTEMVSAVSQLTDSPDTTEEATPVQEVEGGVPDIEEQERRTQEVLQAVAEKVKEESQLPGTGGPEDVLQPVQRAEAERPEEQAEASGLKKETDVVLKVDAQEAKTEPFTQGKVVGQTTPESFEKAPQVTESIESSELVTTCQAETLAGVKSQEMVMEQAIPPDSVETPTDSETDGSTPVADFDAPGTTQKDEIVEIHEENEVASGTQSGGTEAEAVPAQKERPPAPSSFVFQEETKEQSKMEDTLEHTDKEVSVETVSILSKTEGTQEADQYADEKTKDVPFFEGLEGSIDTGITVSREKVTEVALKGEGTEEAECKKDDALELQSHAKSPPSPVEREMVVQVEREKTEAEPTHVNEEKLEHETAVTVSEEVSKQLLQTVNVPIIDGAKEVSSLEGSPPPCLGQEEAVCTKIQVQSSEASFTLTAAAEEEKVLGETANILETGETLEPAGAHLVLEEKSSEKNEDFAAHPGEDAVPTGPDCQAKSTPVIVSATTKKGLSSDLEGEKTTSLKWKSDEVDEQVACQEVKVSVAIEDLEPENGILELETKSSKLVQNIIQTAVDQFVRTEETATEMLTSELQTQAHVIKADSQDAGQETEKEGEEPQASAQDETPITSAKEESESTAVGQAHSDISKDMSEASEKTMTVEVEGSTVNDQQLEEVVLPSEEEGGGAGTKSVPEDDGHALLAERIEKSLVEPKEDEKGDDVDDPENQNSALADTDASGGLTKESPDTNGPKQKEKEDAQEVELQEGKVHSESDKAITPQAQEELQKQERESAKSELTES

SEQ ID NO: 4878 - protein, 396 aa, Homo Sapiens
MVAGTRCLLALLLPQVLLGGAAGLVPELGRRKFAAASSGRPSSQPSDEVLSEFELRLLSMFGLKQRPTPSRDAVVPPYMLDLYRRHSGQPGSPAPDHRLERAASRANTVRSFHHEESLEELPETSGKTTRRFFFNLSSIPTEEFITSAELQVFREQMQDALGNNSSFHHRINIYEIIKPATANSKFPVTRLLDTRLVNQNASRWESFDVTPAVMRWTAQGHANHGFVVEVAHLEEKQGVSKRHVRISRSLHQDEHSWSQIRPLLVTFGHDGKGHPLHKREKRQAKHKQRKRLKSSCKRHPLYVDFSDVGWNDWIVAPPGYHAFYCHGECPFPLADHLNSTNHAIVQTLVNSVNSKIPKACCVPTELSAISMLYLDENEKVVLKNYQDMVVEGCGCR

SEQ ID NO: 4879 - protein, 443 aa, Homo Sapiens
MDPLNLSWYDDDLERQNWSRPFNGSDGKADRPHYNYYATLLTLLIAVIVFGNVLVCMAVSREKALQTTTNYLIVSLAVADLLVATLVMPWVVYLEVVGEWKFSRIHCDIFVTLDVMMCTASILNLCAISIDRYTAVAMPMLYNTRYSSKRRVTVMISIVWVLSFTISCPLLFGLNNADQNECIIANPAFVVYSSIVSFYVPFIVTLLVYIKIYIVLRRRRKRVNTKRSSRAFRAHLRAPLKGNCTHPEDMKLCTVIMKSNGSFPVNRRRVEAARRAQELEMEMLSSTSPPERTRYSPIPPSHHQLTLPDPSHHGLHSTPDSPAKPEKNGHAKDHPKIAKIFEIQTMPNGKTRTSLKTMSRRKLSQQKEKKATQMLAIVLGVFIICWLPFFITHILNIHCDCNIPPVLYSAFTWLGYVNSAVNPIIYTTFNIEFRKAFLKILHC

SEQ ID NO: 4880 - protein, 986 aa, Homo Sapiens
MAGIFYFALFSCLFGICDAVTGSRVYPANEVTLLDSRSVQGELGWIASPLEGGWEEVSIMDEKNTPIRTYQVCNVMEPSQNNWLRTDWITREGAQRVYIEIKFTLRDCNSLPGVMGTCKETFNLYYYESDNDKERFIRENQFVKIDTIAADESFTQVDIGDRIMKLNTEIRDVGPLSKKGFYLAFQDVGACIALVSVRVFYKKCPLTVRNLAQFPDTITGADTSSLVEVRGSCVNNSEEKDVPKMYCGADGEWLVPIGNCLCNAGHEERSGECQACKIGYYKALSTDATCAKCPPHSYSVWEGATSCTCDRGFFRADNDAASMPCTRPPSAPLNLISNVNETSVNLEWSSPQNTGGRQDISYNVVCKKCGAGDPSKCRPCGSGVHYTPQQNGLKTTKVSITDLLAHTNYTFEIWAVNGVSKYNPNPDQSVSVTVTTNQAAPSSIALVQAKEVTRYSVALAWLEPDRPNGVILEYEVKYYEKDQNERSYRIVRTAARNTDIKGLNPLTSYVFHVRARTAAGYGDFSEPLEVTTNTVPSRIIGDGANSTVLLVSVSGSVVLVVILIAAFVISRRRSKYSKAKQEADEEKHLNQGVRTYVDPFTYEDPNQAVREFAKEIDASCIKIEKVIGVGEFGEVCSGRLKVPGKREICVAIKTLKAGYTDKQRRDFLSEASIMGQFDHPNIIHLEGVVTKCKPVMIITEYMENGSLDAFLRKNDGRFTVIQLVGMLRGIGSGMKYLSDMSYVHRDLAARNILVNSNLVCKVSDFGMSRVLEDDPEAAYTTRGGKIPIRWTAPEAIAYRKFTSASDVWSYGIVMWEVMSYGERPYWDMSNQDVIKAIEEGYRLPPPMDCPIALHQLMLDCWQKERSDRPKFGQIVNMLDKLIRNPNSLKRTGTESSRPNTALLDPSSPEFSAVVSVGDWLQAIKMDRYKDNFTAAGYTTLEAVVHVNQEDLARIGITAITHQNKILSSVQAMRTQMQQMHGRMVPV

SEQ ID NO: 4881 - protein, 216 aa, Homo Sapiens
MGWIRGRRSRHSWEMSEFHNYNLDLKKSDFSTRWQKQRCPVVKSKCRENASPFFFCCFIAVAMGIRFIIMVAIWSAVFLNSLFNQEVQIPLTESYCGPCPKNWICYKNNCYQFFDESKNWYESQASCMSQNASLLKVYSKEDQDLLKLVKSYHWMGLVHIPTNGSWQWEDGSILSPNLLTIIEMQKGDCALYASSFKGYIENCSTPNTYICMQRTV

SEQ ID NO: 4882 - protein, 2871 aa, Homo Sapiens
MSCNGGSHPRINTLGRMIRAESGPDLRYEVTSGGGGTSRMYYSRRGVITDQNSDGYCQTGTMSRHQNQNTIQELLQNCSDCLMRAELIVQPELKYGDGIQLTRSRELDECFAQANDQMEILDSLIREMRQMGQPCDAYQKRLLQLQEQMRALYKAISVPRVRRASSKGGGGYTCQSGSGWDEFTKHVTSECLGWMRQQRAEMDMVAWGVDLASVEQHINSHRGIHNSIGDYRWQLDKIKADLREKSAIYQLEEEYENLLKASFERMDHLRQLQNIIQATSREIMWINDCEEEELLYDWSDKNTNIAQKQEAFSIRMSQLEVKEKELNKLKQESDQLVLNQHPASDKIEAYMDTLQTQWSWILQITKCIDVHLKENAAYFQFFEEAQSTEAYLKGLQDSIRKKYPCDKNMPLQHLLEQIKELEKEREKILEYKRQVQNLVNKSKKIVQLKPRNPDYRSNKPIILRALCDYKQDQKIVHKGDECILKDNNERSKWYVTGPGGVDMLVPSVGLIIPPPNPLAVDLSCKIEQYYEAILALWNQLYINMKSLVSWHYCMIDIEKIRAMTIAKLKTMRQEDYMKTIADLELHYQEFIRNSQGSEMFGDDDKRKIQSQFTDAQKHYQTLVIQLPGYPQHQTVTTTEITHHGTCQDVNHNKVIETNRENDKQETWMLMELQKIRRQIEHCEGRMTLKNLPLADQGSSHHITVKINELKSVQNDSQAIAEVLNQLKDMLANFRGSEKYCYLQNEVFGLFQKLENINGVTDGYLNSLCTVRALLQAILQTEDMLKVYEARLTEEETVCLDLDKVEAYRCGLKKIKNDLNLKKSLLATMKTELQKAQQIHSQTSQQYPLYDLDLGKFGEKVTQLTDRWQRIDKQIDFRLWDLEKQIKQLRNYRDNYQAFCKWLYDRKRRQDSLESMKFGDSNTVMRFLNEQKNLHSEISGKRDKSEEVQKIAELCANSIKDYELQLASYTSGLETLLNIPIKRTMIQSPSGVILQEAADVHARYIELLTRSGDYYRFLSEMLKSLEDLKLKNTKIEVLEEELRLARDANSENCNKNKFLDQNLQKYQAECSQFKAKLASLEELKRQAELDGKSAKQNLDKCYGQIKELNEKITRLTYEIEDEKRRRKSVEDRFDQQKNDYDQLQKARQCEKENLGWQKLESEKAIKEKEYEIERLRVLLQEEGTRKREYENELAKVRNHYNEEMSNLRNKYETEINITKTTIKEISMQKEDDSKNLRNQLDRLSRENRDLKDEIVRLNDSILQATEQRRRAEENALQQKACGSEIMQKKQHLEIELKQVMQQRSEDNARHKQSLEEAAKTIQDKNKEIERLKAEFQEEAKRRWEYENELSKVRNNYDEEIISLKNQFETEINITKTTIHQLTMQKEEDTSGYRAQIDNLTRENRSLSEEIKRLKNTLTQTTENLRRVEEDIQQQKATGSEVSQRKQQLEVELRQVTQMRTEESVRYKQSLDDAAKTIQDKNKEIERLKQLIDKETNDRKCLEDENARLQRVQYDLQKANSSATETINKLKVQEQELTRLRIDYERVSQERTVKDQDITRFQNSLKELQLQKQKVEEELNRLKRTASEDSCKRKKLEEELEGMRRSLKEQAIKITNLTQQLEQASIVKKRSEDDLRQQRDVLDGHLREKQRTQEELRRLSSEVEALRRQLLQEQESVKQAHLRNEHFQKAIEDKSRSLNESKIEIERLQSLTENLTKEHLMLEEELRNLRLEYDDLRRGRSEADSDKNATILELRSQLQISNNRTLELQGLINDLQRERENLRQEIEKFQKQALEASNRIQESKNQCTQVVQERESLLVKIKVLEQDKARLQRLEDELNRAKSTLEAETRVKQRLECEKQQIQNDLNQWKTQYSRKEEAIRKIESEREKSEREKNSLRSEIERLQAEIKRIEERCRRKLEDSTRETQSQLETERSRYQREIDKLRQRPYGSHRETQTECEWTVDTSKLVFDGLRKKVTAMQLYECQLIDKTTLDKLLKGKKSVEEVASEIQPFLRGAGSIAGASASPKEKYSLVEAKRKKLISPESTVMLLEAQAATGGIIDPHRNEKLTVDSAIARDLIDFDDRQQIYAAEKAITGFDDPFSGKTVSVSEAIKKNLIDRETGMRLLEAQIASGGVVDPVNSVFLPKDVALARGLIDRDLYRSLNDPRDSQKNFVDPVTKKKVSYVQLKERCRIEPHTGLLLLSVQKRSMSFQGIRQPVTVTELVDSGILRPSTVNELESGQISYDEVGERIKDFLQGSSCIAGIYNETTKQKLGIYEAMKIGLVRPGTALELLEAQAATGFIVDPVSNLRLPVEEAYKRGLVGIEFKEKLLSAERAVTGYNDPETGNIISLFQAMNKELIEKGHGIRLLEAQIATGGIIDPKESHRLPVDIAYKRGYFNEELSEILSDPSDDTKGFFDPNTEENLTYLQLKERCIKDEETGLCLLPLKEKKKQVQTSQKNTLRKRRVVIVDPETNKEMSVQEAYKKGLIDYETFKELCEQECEWEEITITGSDGSTRVVLVDRKTGSQYDIQDAIDKGLVDRKFFDQYRSGSLSLTQFADMISLKNGVGTSSSMGSGVSDDVFSSSRHESVSKISTISSVRNLTIRSSSFSDTLEESSPIAAIFDTENLEKISITEGIERGIVDSITGQRLLEAQACTGGIIHPTTGQKLSLQDAVSQGVIDQDMATSVKPAQKAFIGFEGVKGKKKMSAAEAVKEKWLPYEAGQRFLEFQYLTGGLVDPEVHGRISTEEAIRKGFIDGRAAQRLQDTSSYAKILTCPKTKLKISYKDAINRSMVEDITGLRLLEAASVSSKGLPSPYNMSSAPGSRSGSRSGSRSGSRSGSRSGSRRGSFDATGNSSYSYSYSFSSSSIGH

SEQ ID NO: 4883 - protein, 602 aa, Homo Sapiens
MPSAKQRGSKGGHGAASPSEKGAHPSGGADDVAKKPPPAPQQPPPPPAPHPQQHPQQHPQNQAHGKGGHRGGGGGGGKSSSSSSASAAAAAAAASSSASCSRRLGRALNFLFYLALVAAAAFSGWCVHHVLEEVQQVRRSHQDFSRQREELGQGLQGVEQKVQSLQATFGTFESILRSSQHKQDLTEKAVKQGESEVSRISEVLQKLQNEILKDLSDGIHVVKDARERDFTSLENTVEERLTELTKSINDNIAIFTEVQKRSQKEINDMKAKVASLEESEGNKQDLKALKEAVKEIQTSAKSREWDMEALRSTLQTMESDIYTEVRELVSLKQEQQAFKEAADTERLALQALTEKLLRSEESVSRLPEEIRRLEEELRQLKSDSHGPKEDGGFRHSEAFEALQQKSQGLDSRLQHVEDGVLSMQVASARQTESLESLLSKSQEHEQRLAALQGRLEGLGSSEADQDGLASTVRSLGETQLVLYGDVEELKRSVGELPSTVESLQKVQEQVHTLLSQDQAQAARLPPQDFLDRLSSLDNLKASVSQVEADLKMLRTAVDSLVAYSVKIETNENNLESAKGLLDDLRNDLDRLFVKVEKIHEKV

SEQ ID NO: 4884 - protein, 1137 aa, Homo Sapiens
MAGARSRDPWGASGICYLFGSLLVELLFSRAVAFNLDVMGALRKEGEPGSLFGFSVALHRQLQPRPQSWLLVGAPQALALPGQQANRTGGLFACPLSLEETDCYRVDIDQGADMQKESKENQWLGVSVRSQGPGGKIVTCAHRYEARQRVDQILETRDMIGRCFVLSQDLAIRDELDGGEWKFCEGRPQGHEQFGFCQQGTAAAFSPDSHYLLFGAPGTYNWKGLLFVTNIDSSDPDQLVYKTLDPADRLPGPAGDLALNSYLGFSIDSGKGLVRAEELSFVAGAPRANHKGAVVILRKDSASRLVPEVMLSGERLTSGFGYSLAVADLNSDGWPDLIVGAPYFFERQEELGGAVYVYLNQGGHWAGISPLRLCGSPDSMFGISLAVLGDLNQDGFPDIAVGAPFDGDGKVFIYHGSSLGVVAKPSQVLEGEAVGIKSFGYSLSGSLDMDGNQYPDLLVGSLADTAVLFRARPILHVSHEVSIAPRSIDLEQPNCAGGHSVCVDLRVCFSYIAVPSSYSPTVALDYVLDADTDRRLRGQVPRVTFLSRNLEEPKHQASGTVWLKHQHDRVCGDAMFQLQENVKDKLRAIVVTLSYSLQTPRLRRQAPGQGLPPVAPILNAHQPSTQRAEIHFLKQGCGEDKICQSNLQLVHARFCTRVSDTEFQPLPMDVDGTTALFALSGQPVIGLELMVTNLPSDPAQPQADGDDAHEAQLLVMLPDSLHYSGVRALDPAEKPLCLSNENASHVECELGNPMKRGAQVTFYLILSTSGISIETTELEVELLLATISEQELHPVSARARVFIELPLSIAGMAIPQQLFFSGVVRGERAMQSERDVGSKVKYEVTVSNQGQSLRTLGSAFLNIMWPHEIANGKWLLYPMQVELEGGQGPGQKGLCSPRPNILHLDVDSRDRRRRELEPPEQQEPGERQEPSMSWWPVSSAEKKKNITLDCARGTANCVVFSCPLYSFDRAAVLHVWGRLWNSTFLEEYSAVKSLEVIVRANITVKSSIKNLMLRDASTVIPVMVYLDPMAVVAEGVPWWVILLAVLAGLLVLALLVLLLWKMGFFKRAKHPEATVPQYHAVKIPREDRQQFKEEKTGTILRNNWGSPRREGPDAHPILAADGHPELGPDGHPGPGTA

SEQ ID NO: 4885 - protein, 509 aa, Homo Sapiens [sequence omitted]

SEQ ID NO: 4886 - protein, 685 aa, Homo Sapiens [sequence omitted]

SEQ ID NO: 4887 - protein, 152 aa, Homo Sapiens
SLTGNSLGRNDLADGVNSGQGLGIEIIGTLQLVLCVLATTDRRRRDLGGSAPLAIGLSVALGHLLAIDYTGCGINPARSFGSAVITHNFSNHWIFWVGPFIGGALAVLIYDFILAPRSSDLTDRVKVWTSGQVEEYDLDADDINSRVEMKPK

SEQ ID NO: 4888 - protein, 1089 aa, Homo Sapiens
MGTSHPAFLVLGCLLTGLSLILCQLSLPSILPNENEKVVQLNSSFSLRCFGESEVSWQYPMSEEESSDVEIRNEENNSGLFVTVLEVSSASAAHTGLYTCYYNHTQTEENELEGRHIYIYVPDPDVAFVPLGMTDYLVIVEDDDSAIIPCRTTDPETPVTLHNSEGVVPASYDSRQGFNGTFTVGPYICEATVKGKKFQTIPFNVYALKATSELDLEMEALKTVYKSGETIVVTCAVFNNEVVDLQWTYPGEVKGKGITMLEEIKVPSIKLVYTLTVPEATVKDSGDYECAARQATREVKEMKKVTISVHEKGFIEIKPTFSQLEAVNLHEVKHFVVEVRAYPPPRISWLKNNLTLIENLTEITTDVEKIQEIRYRSKLKLIRAKEEDSGHYTIVAQNEDAVKSYTFELLTQVPSSILDLVDDHHGSTGGQTVRCTAEGTPLPDIEWMICKDIKKCNNETSWTILANNVSNIITEIHSRDRSTVEGRVTFAKVEETIAVRCLAKNLLGAENRELKLVAPTLRSELTVAAAVLVLLVIVIISLIVLVVIWKQKPRYEIRWRVIESISPDGHEYIYVDPMQLPYDSRWEFPRDGLVLGRVLGSGAFGKVVEGTAYGLSRSQPVMKVAVKMLKPTARSSEKQALMSELKIMTHLGPHLNIVNLLGACTKSGPIYIITEYCFYGDLVNYLHKNRDSFLSHHPEKPKKELDIFGLNPADESTRSYVILSFENNGDYMDMKQADTTQYVPMLERKEVSKYSDIQRSLYDRPASYKKKSMLDSEVKNLLSDDNSEGLTLLDLLSFTYQVARGMEFLASKNCVHRDLAARNVLLAQGKIVKICDFGLARDIMHDSNYVSKGSTFLPVKWMAPESIFDNLYTTLSDVWSYGILLWEIFSLGGTPYPGMMVDSTFYNKIKSGYRMAKPDHATSEVYEIMVKCWNSEPEKRPSFYHLSEIVENLLPGQYKKSYEKIHLDFLKSDHPAVARMRVDSDNAYIGVTYKNEEDKLKDWEGGLDEQRLSADSGYIIPLPDIDPVPEEEDLGKRNRHSSQTSEESAIETGSSSSTFIKREDETIEDIDMMDDIGIDSSDLVEDSFL

SEQ ID NO: 4889 - protein, 253 aa, Homo Sapiens
MANLGCWMLVLFVATWSDLGLCKKRPKPGGWNTGGSRYPGQGSPGGNRYPPQGGGGWGQPHGGGWGQPHGGGWGQPHGGGWGQPHGGGWGQGGGTHSQWNKPSKPKTNMKHMAGAAAAGAVVGGLGGYMLGSAMSRPIIHFGSDYEDRYYRENMHRYPNQVYYRPMDEYSNQNNFVHDCVNITIKQHTVTTTTKGENFTETDVKMMERVVEQMCITQYERESQAYYQRGSSMVLFSSPPVILLISFLIFLIVG

SEQ ID NO: 4890 - protein, 482 aa, Homo Sapiens
MPPSPLDDRVVVALSRPVRPQDLNLCLDSSYLGSANPGSNSHPPVIATTVVSLKAANLTYMPSSSGSARSLNCGCSSASCCTVATYDKDNQAQTQAIAAGTTTTAIGTSTTCPANQMVNNNENTGSLSPSSGVGSPVSGTPKQLASIKIIYPNDLAKKMTKCSKSHLPSQGPVIIDCRPFMEYNKSHIQGAVHINCADKISRRRLQQGKITVLDLISCREGKDSFKRIFSKEIIVYDENTNEPSRVMPSQPLHIVLESLKREGKEPLVLKGGLSSFKQNHENLCDNSLQLQECREVGGGASAASSLLPQPIPTTPDIENAELTPILPFLFLGNEQDAQDLDTMQRLNIGYVINVTTHLPLYHYEKGLFNYKRLPATDSNKQNLRQYFEEAFEFIEEAHQCGKGLLIHCQAGVSRSATIVIAYLMKHTRMTMTDAYKFVKGKRPIISPNLNFMGQLLEFEEDLNNGVTPRILTPKLMGVETVV

SEQ ID NO: 4891 - protein, 663 aa, Homo Sapiens
MIEKMQGSRMDEQRCSFPPPLKTEEDYIPYPSVHEVLGREGPFPLILLPQFGGYWIEGTNHEITSIPETEPLQSPTTKVKLECNPTARIYRKHFLGKEHFNYYSLDTALGHLVFSLKYDVIGDQEHLRLLLRTKCRTYHDVIPISCLTEFPNVVQMAKLVCEDVNVDRFYPVLYPKASRLIVTFDEHVISNNFKFGVIYQKLGQTSEEELFSTNEESPAFVEFLEFLGQKVKLQDFKGFRGGLDVTHGQTGTESVYCNFRNKEIMFHVSTKLPYTEGDAQQLQRKRHIGNDIVAVVFQDENTPFVPDMIASNFLHAYVVVQAEGGGPDGPLYKVSVTARDDVPFFGPPLPDPAVFRKGPEFQEFLLTKLINAEYACYKAEKFAKLEERTRAALLETLYEELHIHSQSMMGLGGDEDKMENGSGGGGFFESFKRVIRSRSQSMDAMGLSNKKPNTVSTSHSGSFAPNNPDLAKAAGISLIVPGKSPTRKKSGPFGSRRSSAIGIENIQEVQEKRESPPAGQKTPDSGHVSQEPKSENSSTQSSPEMPTTKNRAETAAQRAEALKDFSRSSSSASSFASVVEETEGVDGEDTGLESVSSSGTPHKRDSFIYSTWLEDSVSTTSGGSSPGPSRSPHPDAGKLGDPACPEIKIQLEASEQHMPQLGC

SEQ ID NO: 4892 - protein, 37 aa, Homo Sapiens
MAMAEGERTECAEPPRDEPPADGALKRAEELKTQAND

SEQ ID NO: 4893 - protein, 259 aa, Homo Sapiens
MNKLKSSQKDKVRQFMIFTQSSEKTAVSCLSQNDWKLDVATDNFFQNPELYIRESVKGSLDRKKLEQLYNRYKDPQDENKIGIDGIQQFCDDLALDPASISVLIIAWKFRAATQCEFSKQEFMDGMTELGCDSIEQLKAQIPKMEQELKEPGRFKDFYQFTFNFAKNPGQKGLDLEMAIAYWNLVLNGRFKFLDLWNKFLLEHHKRSIPKDTWNLLLDFSTMIADDMSNYDEEGAWPVLIDDFVEFARPQIAGTKSTTV

SEQ ID NO: 4894 - protein, 461 aa, Homo Sapiens
MNNFGNEEFDCHFLDEGFTAKDILDQKINEVSSSDDKDAFYVADLGDILKKHLRWLKALPRVTPFYAVKCNDSKAIVKTLAATGTGFDCASKTEIQLVQSLGVPPERIIYANPCKQVSQIKYAANNGVQMMTFDSEVELMKVARAHPKAKLVLRIATDDSKAVCRLSVKFGATLRTSRLLLERAKELNIDVVGVSFHVGSGCTDPETFVQAISDARCVFDMGAEVGFSMYLLDIGGGFPGSEDVKLKFEEITGVINPALDKYFPSDSGVRIIAEPGRYYVASAFTLAVNIIAKKIVLKEQTGSDDEDESSEQTFMYYVNDGVYGSFNCILYDHAHVKPLLQKRPKPDEKYYSSSIWGPTCDGLDRIVERCDLPEMHVGDWMLFENMGAYTVAAASTFNGFQRPTIYYVMSGPAWQLMQQFQNPDFPPEVEEQDASTLPVSCAWESGMKRHRAACASASINV

SEQ ID NO: 4895 - protein, 380 aa, Homo Sapiens
MVMIISTMEPQVSNGPTSNTSNGPSSNNRNCPSPMQTGATTDDSKTNLIVNYLPQNMTQEEFRSLFGSIGEIESCKLVRDKITGQSLGYGFVNYIDPKDAEKAINTLNGLRLQTKTIKVSYARPSSASIRDANLYVSGLPKTMTQKELEQLFSQYGRIITSRILVDQVTGVSRGVGFIRFDKRIEAEEAIKGLNGQKPSGATEPITVKFANNPSQKSSQALLSQLYQSPNRRYPGPLHHQAQRFRLDNLLNMAYGVKRLMSGPVPPSACSPRFSPITIDGMTSLVGMNIPGHTGTGWCIFVYNLSPDSDESVLWQLFGPFGAVNNVKVIRDFNTNKCKGFGFVTMTNYDEAAMAIASLNGYRLGDRVLQVSFKTNKAHKS

SEQ ID NO: 4896 - protein, 270 aa, Homo Sapiens
MACRPRSPPRHQSRCDGDASPPSPARWSLGRKRRADGRRWRPEDAEEAEHRGAERRPESFTTPEGPKPRSRCSDWASAVEEDEMRTRVNKEMARYKRKLLINDFGRERKSSSGSSDSKESMSTVPADFETDESVLMRRQKQINYGKNTIAYDRYIKEVPRHLRQPGIHPKTPNKFKKYSRRSWDQQIKLWKVALHFWDPPAEEGCDLQEIHPVDLESAESSSEPQTSSQDDFDVYSGTPTKVRHMDSQVEDEFDLEACLTEPLRDFSAMS

SEQ ID NO: 4897 - protein, 685 aa, Homo Sapiens
MDGAGAEEVLAPLRLAVRQQGDLVRKLKEDKAPQVDVDKAVAELKARKRVLEAKELALQPKDDIVDRAKMEDTLKRRFFYDQAFAIYGGVSGLYDFGPVGCALKNNIIQTWRQHFIQEEQILEIDCTMLTPEPVLKTSGHVDKFADFMVKDVKNGECFRADHLLKAHLQKLMSDKKCSVEKKSEMESVLAQLDNYGQQELADLFVNYNVKSPITGNDLSPPVSFNLMFKTFIGPGGNMPGYLRPETAQGIFLNFKRLLEFNQGKLPFAAAQIGNSFRNEISPRSGLIRVREFTMAEIEHFVDPSEKDHPKFQNVADLHLYLYSAKAQVSGQSARKMRLGDAVEQGVINNTVLGYFIGRIYLYLTKVGISPDKLRFRQHMENEMAHYACDCWDAESKTSYGWIEIVGCADRSCYDLSCHARATKVPLVAEKPLKEPKTVNVVQFEPSKGAIGKAYKKDAKLVMEYLAICDECYITEMEMLLNEKGEFTIETEGKTFQLTKDMINVKRFQKTLYVEEVVPNVIEPSFGLGRIMYTVFEHTFHVREGDEQRTFFSFPAVVAPFKCSVLPLSQNQEFMPFVKELSEALTRHGVSHKVDDSSGSIGRRYARTDEIGVAFGVTIDFDTVNKTPHTATLRDRDSMRQIRAEISELPSIVQDLANGNITWADVEARYPLFEGQETGKKETIEE

SEQ ID NO: 4898 - protein, 288 aa, Homo Sapiens
MGHTRRQGTSPSKCPYLNFFQLLVLAGLSHFCSGVIHVTKEVKEVATLSCGHNVSVEELAQTRIYWQKEKKMVLTMMSGDMNIWPEYKNRTIFDITNNLSIVILALRPSDEGTYECVVLKYEKDAFKREHLAEVTLSVKADFPTPSISDFEIPTSNIRRIICSTSGGFPEPHLSWLENGEELNAINTTVSQDPETELYAVSSKLDFNMTTNHSFMCLIKYGHLRVNQTFNWNTTKQEHFPDNLLPSWAITLISVNGIFVICCLTYCFAPRCRERRRNERLRRESVRPV

SEQ ID NO: 4899 - protein, 389 aa, Homo Sapiens
MLSLRVPLAPITDPQQLQLSPLKGLSLVDKENTPPALSGTRVLASKTARRIFQEPTEPKTKAAAPGVEDEPLLRENPRRFVIFPIEYHDIWQMYKKAEASFWTAEEVDLSKDIQHWESLKPEERYFISHVLAFFAASDGIVNENLVERFSQEVQITEARCFYGFQIAMENIHSEMYSLLIDTYIKDPKEREFLFNAIETMPCVKKKADWALRWIGDKEATYGERVVAFAAVEGIFFSGSFASIFWLKKRGLMPGLTFSNELISRDEGLHCDFACLMFKHLVHKPSEERVREIIINAVRIEQEFLTEALPVKLIGMNCTLMKQYIEFVADRLMLELGFSKVFRVENPFDFMENISLEGKTNFFEKRVGEYQRMGVMSSPTENSFTLDADF

SEQ ID NO: 4900 - protein, 476 aa, Homo Sapiens
MAGRGGSALLALCGALAACGWLLGAEAQEPGAPAAGMRRRRRLQQEDGISFEYHRYPELREALVSVWLQCTAISRIYTVGRSFEGRELLVIELSDNPGVHEPGEPEFKYIGNMHGNEAVGRELLIFLAQYLCNEYQKGNETIVNLIHSTRIHIMPSLNPDGFEKAASQPGELKDWFVGRSNAQGIDLNRNFPDLDRIVYVNEKEGGPNNHLLKNMKKIVDQNTKLAPETKAVIHWIMDIPFVLSANLHGGDLVANYPYDETRSGSAHEYSSSPDDAIFQSLARAYSSFNPAMSDPNRPPCRKNDDDSSFVDGTTNGGAWYSVPGGMQDFNYLSSNCFEITVELSCEKFPPEETLKTYWEDNKNSLISYLEQIHRGVKGFVRDLQGNPIANATISVEGIDHDVTSAKDGDYWRLLIPGNYKLTASAPGYLAITKKVAVPYSPAAGVDFELESFSERKEEEKEELMEWWKMMSETLNF

SEQ ID NO: 4901 - protein, 1111 aa, Homo Sapiens
MLQFVSNQVGEFPDLFSEQLCSSFPGSGGSGSSSGSSGSSSSSSNGRGSSSGAVDPSVQRSFTQVTLPSFSPSAASPQAPTLQVKVSPTSVPTTPRATPILQPRPQPQPQPQTQLQQQTVMITPTFSTTPQTRIIQQPLIYQNAATSFQVLQPQVQSLVTSSQVQPVTIQQQVQTVQAQRVLTQTANGTLQTLAPATVQTVAAPQVQQVPVLVQPQIIKTDSLVLTTLKTDGSPVMAAVQNPALTALTTPIQTAALQVPTLVGSSGTILTTMPVMMGQEKVPIKQVPGGVKQLEPPKEGERRTTHNIIEKRYRSSINDKIIELKDLVMGTDAKMHKSGVLRKAIDYIKYLQQVNHKLRQENMVLKLANQKNKLLKGIDLGSLVDNEVDLKIEDFNQNVLLMSPPASDSGSQAGFSPYSIDSEPGSPLLDDAKVKDEPDSPPVALGMVDRSRILLCVLTFLCLSFNPLTSLLQWGGAHDSDQHPHSGSGRSVLSFESGSGGWFDWMMPTLLLWLVNGVIVLSVFVKLLVHGEPVIRPHSRSSVTFWRHRKQADLDLARGDFAAAAGNLQTCLAVLGRALPTSRLDLACSLSWNVIRYSLQKLRLVRWLLKKVFQCRRATPATEAGFEDEAKTSARDAALAYHRLHQLHITGKLPAGSACSDVHMALCAVNLAECAEEKIPPSTLVEIHLTAAMGLKTRCGGKLGFLASYFLSRAQSLCGPEHSAVPDSLRWLCHPLGQKFFMERSWSVKSAAKESLYCAQRNPADPIAQVHQAFCKNLLERAIESLVKPQAKKKAGDQEEESCEFSSALEYLKLLHSFVDSVGVMSPPLSRSSVLKSALGPDIICRWWTSAITVAISWLQGDDAAVRSHFTKVERIPKALEVTESPLVKAIFHACRAMHASLPGKADGQQSSFCHCERASGHLWSSLNVSGATSDPALNHVVQLLTCDLLLSLRTALWQKQASASQAVGETYHASGAELAGFQRDLGSLRRLAHSFRPAYRKVFLHEATVRLMAGASPTRTHQLLEHSLRRRTTQSTKHGEVDAWPGQRERATAILLACRHLPLSFLSSPGQRAVLLAEAARTLEKVGDRRSCNDCQQMIVKLGGGTAIAAS

SEQ ID NO: 4902 - protein, 158 aa, Homo Sapiens
MAEQATKSVLFVCLGNICRSPIAEAVFRKLVTDQNISENWRVDSAATSGYEIGNPPDYRGQSCMKRHGIPMSHVARQITKEDFATFDYILCMDESNLRDLNRKSNQVKTCKAKIELLGSYDPQKQLIIEDPYYGNDSDFETVYQQCVRCCRAFLEKAH

SEQ ID NO: 4903 - protein, 291 aa, Homo Sapiens
RAPSATLLDTGESVAAVASGEDKGIAASAAAAAVFACSCSPDPQSSTMNPVYSPVQPGAPYGNPKNMAYTGYPTAYPAAAPAYNPSLYPTNSPSYAPEFQFLHSAYATLLMKQAWPQNSSSCGTEGTFHLPVDTGTENRTYQASSAAFRYTAGTPYKVPPTQSNTAPPPYSPSPNPYQTAMYPIRSAYPQQNLYAQGAYYTQPVYAAQPHVIHHTTVVQPNSIPSAIYPAPVAAPRTNGVAMGMVAGTTMAMSAGTLLTTPQHTAIGAHPVSMPTYRAQGTPAYSYVPPHW

SEQ ID NO: 4904 - protein, 244 aa, Homo Sapiens
MAAAAAAGEARRVLVYGGRGALGSRCVQAFRARNWWVASVDVVENEEASATIIVKMTDSFTEQADQVTAEVGKLLGEEKVDAILCVAGGWAGGNAKSKSLFKNCDLMWKQSIWTSTISSHLATKHLKEGGLLTLAGAKAALDGTPGMIGYGMAKGAVHQLCQSLAGKNSGMPPGAAAIAVLPVTLDTPMNRKSMPEADFSSWTPLEFLVETFHDWITGKNRPSSGSLIQVVTTEGRTELTPAYF

SEQ ID NO: 4905 - protein, 672 aa, Homo Sapiens
DCTGDGPWQSNLAPSQLEYYASSPDEKALVEAAARIGIVFIGNSEETMEVKTLGKLERYKLLHILEFDSDRRRMSVIVQAPSGEKLLFAKGAESSILPKCIGGEIEKTRIHVDEFALKGLRTLCIAYRKFTSKEYEEIDKRIFEARTALQQREEKLAAVFQFIEKDLILLGATAVEDRLQDKVRETIEALRMAGIKVWVLTGDKHETAVSVSLSCGHFHRTMNILELINQKSDSECAEQLRQLARRITEDHVIQHGLVVDGTSLSLALREHEKLFMEVCRNCSAVLCCRMAPLQKAKVIRLIKISPEKPITLAVGDGANDVSMIQEAHVGIGIMGKEGRQAARNSDYAIARFKFLSKLLFVHGHFYYIRIATLVQYFFYKNVCFITPQFLYQFYCLFSQQTLYDSVYLTLYNICFTSLPILIYSLLEQHVDPHVLQNKPTLYRDISKNRLLSIKTFLYWTILGFSHAFIFFFGSYLLIGKDTSLLGNGQMFGNWTFGTLVFTVMVITVTVKMALETHFWTWINHLVTWGSIIFYFVFSLFYGGILWPFLGSQNMYFVFIQLLSSGSAWFAIILMVVTCLFLDIIKKVFDRHLHPTSTEKAQLTETNAGIKCLDSMCCFPEGEAACASVGRMLERVIGRCSPTHISRSWSASDPFYTNDRSILTLSTMDSSTC

SEQ ID NO: 4906 - protein, 1172 aa, Homo Sapiens [sequence omitted]

SEQ ID NO: 4907 - protein, 289 aa, Homo Sapiens
MELLCHEVDPVRRAVRDRNLLRDDRVLQNLLTIEERYLPQCSYFKCVQKDIQPYMRRMVATWMLEVCEEQKCEEEVFPLAMNYLDRFLAGVPTPKSHLQLLGAVCMFLASKLKETSPLTAEKLCIYTDNSIKPQELLEWELVVLGKLKWNLAAVTPHDFIEHILRKLPQQREKLSLIRKHAQTFIALCATDFKFAMYPPSMIATGSVGAAICGLQQDEEVSSLTCDALTELLAKITNTDVDCLKACQEQIEAVLLNSLQQYRQDQRDGSKSEDELDQASTPTDVRDIDL

SEQ ID NO: 4908 - protein, 551 aa, Homo Sapiens
MAAPALSWRLPLLILLLPLATSWASAAVNGTSQFTCFYNSRANISCVWSQDGALQDTSCQVHAWPDRRRWNQTCELLPVSQASWACNLILGAPDSQKLTTVDIVTLRVLCREGVRWRVMAIQDFKPFENLRLMAPISLQVVHVETHRCNISWEISQASHYFERHLEFEARTLSPGHTWEEAPLLTLKQKQEWICLETLTPDTQYEFQVRVKPLQGEFTTWSPWSQPLAFRTKPAALGKDTIPWLGHLLVGLSGAFGFIILVYLLINCRNTGPWLKKVLKCNTPDPSKFFSQLSSEHGGDVQKWLSSPFPSSSFSPGGLAPEISPLEVLERDKVTQLLLQQDKVPEPASLSSNHSLTSCFTNQGYFFFHLPDALEIEACQVYFTYDPYSEEDPDEGVAGAPTGSSPQPLQPLSGEDDAYCTFPSRDDLLLFSPSLLGGPSPPSTAPGGSGAGEERMPPSLQERVPRDWDPQPLGPPTPGVPDLVDFQPPPELVLREAGEEVPDAGPREGVSFPWSRPPGQGEFRALNARLPLNTDAYLSLQELQGQDPTHLV

SEQ ID NO: 4909 - protein, 435 aa, Homo Sapiens
MAAHLLPICALFLTLLDMAQGFRGPLLPNRPFTTVWNANTQWCLERHGVDVDVSVFDVVANPGQTFRGPDMTIFYSSQLGTYPYYTPTGEPVFGGLPQNASLIAHLARTFQDILAAIPAPDFSGLAVIDWEAWRPRWAFNWDTKDIYRQRSRALVQAQHPDWPAPQVEAVAQDQFQGAARAWMAGTLQLGRALRPRGLWGFYGFPDCYNYDFLSPNYTGQCPSGIRAQNDQLGWLWGQSRALYPSIYMPAVLEGTGKSQMYVQHRVAEAFRVAVAAGDPNLPVLPYVQIFYDTTNHFLPLDELEHSLGESAAQGAAGVVLWVSWENTRTKESCQAIKEYMDTTLGPFILNVTSGALLCSQALCSGHGRCVRRTSHPKALLLLNPASFSIQLTPGGGPLSLRGALSLEDQAQMAVEFKCRCYPGWQAPWCERKSMW

SEQ ID NO: 4910 - protein, 418 aa, Homo Sapiens [sequence omitted]

SEQ ID NO: 4911 - protein, 631 aa, Homo Sapiens
MAPPGSSTVFLLALTIIASTWALTPTHYLTKHDVERLKASLDRPFTNLESAFYSIVGLSSLGAQVPDAKKACTYIRSNLDPSNVDSLFYAAQASQALSGCEISISNETKDLLLAAVSEDSSVTQIYHAVAALSGFGLPLASQEALSALTARLSKEETVLATVQALQTASHLSQQADLRSIVEEIEDLVARLDELGGVYLQFEEGLETTALFVAATYKLMDHVGTEPSIKEDQVIQLMNAIFSKKNFESLSEAFSVASAAAVLSHNRYHVPVVVVPEGSASDTHEQAILRLQVTNVLSQPLTQATVKLEHAKSVASRATVLQKTSFTPVGDVFELNFMNVKFSSGYYDFLVEVEGDNRYIANTVELRVKISTEVGITNVDLSTVDKDQSIAPKTTRVTYPAKAKGTFIADSHQNFALFFQLVDVNTGAELTPHQTFVRLHNQKTGQEVVFVAEPDNKNVYKFELDTSERKIEFDSASGTYTLYLIIGDATLKNPILWNVADVVIKFPEEEAPSTVLSQNLFTPKQEIQHLFREPEKRPPTVVSNTFTALILSPLLLLFALWIRIGANVSNFTFAPSTIIFHLGHAAMLGLMYVYWTQLNMFQTLKYLAILGSVTFLAGNRMLAQQAVKRTAH

SEQ ID NO: 4912 - protein, 511 aa, Homo Sapiens
MKFFLLLFTIGFCWAQYSPNTQQGRTSIVHLFEWRWVDIALECERYLAPKGFGGVQVSPPNENVAIYNPFRPWWERYQPVSYKLCTRSGNEDEFRNMVTRCNNVGVRIYVDAVINHMCGNAVSAGTSSTCGSYFNPGSRDFPAVPYSGWDFNDGKCKTGSGDIENYNDATQVRDCRLTGLLDLALEKDYVRSKIAEYMNHLIDIGVAGFRLDASKHMWPGDIKAILDKLHNLNSNWFPAGSKPFIYQEVIDLGGEPIKSSDYFGNGRVTEFKYGAKLGTVIRKWNGEKMSYLKNWGEGWGFVPSDRALVFVDNHDNQRGHGAGGASILTFWDARLYKMAVGFMLAHPYGFTRVMSSYRWPRQFQNGNDVNDWVGPPNNNGVIKEVTINPDTTCGNDWVCEHRWRQIRNMVIFRNVVDGQPFTNWYDNGSNQVAFGRGNRGFIVFNNDDWSFSLTLQTGLPAGTYCDVISGDKINGNCTGIKIYVSDDGKAHFSISNSAEDPFIAIHAESKL

SEQ ID NO: 4913 - protein, 751 aa, Homo Sapiens [sequence omitted]

SEQ ID NO: 4914 - protein, 961 aa, Homo Sapiens
MLAPRGAAVLLLHLVLQRWLAAGAQATPQVFDLLPSSSQRLNPGALLPVLTDPALNDLYVISTFKLQTKSSATIFGLYSSTDNSKYFEFTVMGRLNKAILRYLKNDGKVHLVVFNNLQLADGRRHRILLRLSNLQRGAGSLELYLDCIQVDSVHNLPRAFAGPSQKPETIELRTFQRKPQDFLEELKLVVRGSLFQVASLQDCFLQQSEPLAATGTGDFNRQFLGQMTQLNQLLGEVKDLLRQQVKETSFLRNTIAECQACGPLKFQSPTPSTVVPPAPPAPPTRPPRRCDSNPCFRGVQCTDSRDGFQCGPCPEGYTGNGITCIDVDECKYHPCYPGVHCINLSPGFRCDACPVGFTGPMVQGVGISFAKSNKQVCTDIDECRNGACVPNSICVNTLGSYRCGPCKPGYTGDQIRGCKAERNCRNPELNPCSVNAQCIEERQGDVTCVCGVGWAGDGYICGKDVDIDSYPDEELPCSARNCKKDNCKYVPNSGQEDADRDGIGDACDEDADGDGILNEQDNCVLIHNVDQRNSDKDIFGDACDNCLSVLNNDQKDTDGDGRGDACDDDMDGDGIKNILDNCPKFPNRDQRDKDGDGVGDACDSCPDVSNPNQSDVDNDLVGDSCDTNQDSDGDGHQDSTDNCPTVINSAQLDTDKDGIGDECDDDDDNDGIPDLVPPGPDNCRLVPNPAQEDSNSDGVGDICESDFDQDQVIDRIDVCPENAEVTLTDFRAYQTVVLDPEGDAQIDPNWVVLNQGMEIVQTMNSDPGLAVGYTAFNGVDFEGTFHVNTQTDDDYAGFIFGYQDSSSFYVVMWKQTEQTYWQATPFRAVAEPGIQLKAVKSKTGPGEHLRNSLWHTGDTSDQVRLLWKDSRNVGWKDKVSYRWFLQHRPQVGYIRVRFYEGSELVADSGVTIDTTMRGGRLGVFCFSQENIIWSNLKYRCNDTIPEDFQEFQTQNFDRFDN

SEQ ID NO: 4915 - protein, 652 aa, Homo Sapiens
MAMDEYLWMVILGFIIAFILAFSVGANDVANSFGTAVGSGVVTLRQACILASIFETTGSVLLGAKVGETIRKGIIDVNLYNETVETLMAGEVSAMVGSAVWQLIASFLRLPISGTHCIVGSTIGFSLVAIGTKGVQWMELVKIVASWFISPLLSGFMSGLLFVLIRIFILKKEDPVPNGLRALPVFYAATIAINVFSIMYTGAPVLGLVLPMWAIALISFGVALLFAFFVWLFVCPWMRRKITGKLQKEGALSRVSDESLSKVQEAESPVFKELPGAKANDDSTIPLTGAAGETLGTSEGTSAGSHPRAAYGRALSMTHGSVKSPISNGTFGFDGHTRSDGHVYHTVHKDSGLYKDLLHKIHIDRGPEEKPAQESNYRLLRRNNSYTCYTAAICGLPVHATFRAADSSAPEDSEKLVGDTVSYSKKRLRYDSYSSYCNAVAEAEIEAEEGGVEMKLASELADPDQPREDPAEEEKEEKDAPEVHLLFHFLQVLTACFGSFAHGGNDVSNAIGPLVALWLIYKQGGVTQEAATPVWLLFYGGVGICTGLWVWGRRVIQTMGKDLTPITPSSGFTIELASAFTVVIASNIGLPVSTTHCKVGSVVAVGWIRSRKAVDWRLFRNIFVAWFVTVPVAGLFSAAVMALLMYGILPYV

SEQ ID NO: 4916 - protein, 1224 aa, Homo Sapiens
MLTKFETKSARVKGLSFHPKRPWILTSLHNGVIQLWDYRMCTLIDKFDEHDGPVRGIDFHKQQPLFVSGGDDYKIKVWNYKLRRCLFTLLGHLDYIRTTFFHHEYPWILSASDDQTIRVWNWQSRTCVCVLTGHNHYVMCAQFHPTEDLVVSASLDQTVRVWDISGLRKKNLSPGAVESDVRGITGVDLFGTTDAVVKHVLEGHDRGVNWAAFHPTMPLIVSGADDRQVKIWRMNESKAWEVDTCRGHYNNVSCAVFHPRQELILSNSEDKSIRVWDMSKRTGVQTFRRDHDRFWVLAAHPNLNLFAAGHDGGMIVFKLERERPAYAVHGNMLHYVKDRFLRQLDFNSSKDVAVMQLRSGSKFPVFNMSYNPAENAVLLCTRASNLENSTYDLYTIPKDADSQNPDAPEGKRSSGLTAVWVARNRFAVLDRMHSLLIKNLKNEITKKVQVPNCDEIFYAGTGNLLLRDADSITLFDVQQKRTLASVKISKVKYVIWSADMSHVALLAKHAIVICNRKLDALCNIHENIRVKSGAWDESGVFIYTTSNHIKYAVTTGDHGIIRTLDLPIYVTRVKGNNVYCLDRECRPRVLTIDPTEFKFKLALINRKYDEVLHMVRNAKLVGQSIIAYLQKKGYPEVALHFVKDEKTRFSLALECGNIEIALEAAKALDDKNCWEKLGEVALLQGNHQIVEMCYQRTKNFDKVSFLYLITGNLEKLRKMMKIAEIRKDMSGHYQNALYLGDVSERVRILKNCGQKSLAYLTAATHGLDEEAESLKETFDPEKETIPDIDPNAKLLQPPAPIMPLDTNWPLLTVSKGFFEGTIASKGKGGALAADIDIDTVGTEGWGEDAELQLDEDGFVEATEGLGDDALGKGQEEGGGWDVEEDLELPPELDISPGAAGGAEDGFFVPPTKGTSPTQIWCNNSQLPVDHILAGSFETAMRLLHDQVGVIQFGPYKQLFLQTYARGRTTYQALPCLPSMYGYPNRNWKDAGLKNGVPAVGLKLNDLIQRLQLCYQLTTVGKFEEAVEKFRSILLSVPLLVVDNKQEIAEAQQLITICREYIVGLSVETERKKLPKETLEQQKRICEMAAYFTHSNLQPVHMILVLRTALNLFFKLKNFKTAATFARRLLELGPKPEVAQQTRKILSACEKNPTDAYQLNYDMHNPFDICAASYRPIYRGKPVEKCPLSGACYSPEFKGQICRVTTVTEIGKDVIGLRISPLQFR

SEQ ID NO: 4917 - protein, 4377 aa, Homo Sapiens
MAHAASQLKKNRDLEINAEEEPEKKRKHRKRSRDRKKKSDANASYLRAARAGHLEKALDYIKNGVDINICNQNGLNALHLASKEGHVEVVSELLQREANVDAATKKGNTALHIASLAGQAEVVKVLVTNGANVNAQSQNGFTPLYMAAQENHLEVVKFLLDNGASQSLATEDGFTPLAVALQQGHDQVVSLLLENDTKGKVRLPALHIAARKDDTKAAALLLQNDNNADVESKSGFTPLHIAAHYGNINVATLLLNRAAAVDFTARNDITPLHVASKRGNANMVKLLLDRGAKIDAKTRDGLTPLHCGARSGHEQVVEMLLDRAAPILSKTKNGLSPLHMATQGDHLNCVQLLLQHNVPVDDVTNDYLTALHVAAHCGHYKVAKVLLDKKANPNAKALNGFTPLHIACKKNRIKVMELLLKHGASIQAVTESGLTPIHVAAFMGHVNIVSQLMHHGASPNTTNVRGETALHMAARSGQAEVVRYLVQDGAQVEAKAKDDQTPLHISARLGKADIVQQLLQQGASPNAATTSGYTPLHLSAREGHEDVAAFLLDHGASLSITTKKGFTPLHVAAKYGKLEVANLLLQKSASPDAAGKSGLTPLHVAAHYDNQKVALLLLDQGASPHAAAKNGYTPLHIAAKKNQMDIATTLLEYGADANAVTRQGIASVHLAAQEGHVDMVSLLLGRNANVNLSNKSGLTPLHLAAQEDRVNVAEVLVNQGAHVDAQTKMGYTPLHVGCHYGNIKIVNFLLQHSAKVNAKTKNGYTPLHQAAQQGHTHIINVLLQNNASPNELTVNGNTALGIARRLGYISVVDTLKIVTEETMTTTTVTEKHKMNVPETMNEVLDMSDDEVRKANAPEMLSDGEYISDVEEGEDAMTGDTDKYLGPQDLKELGDDSLPAEGYMGFSLGARSASLRSFSSDRSYTLNRSSYARDSMMIEELLVPSKEQHLTFTREFDSDSLRHYSWAADTLDNVNLVSSPIHSGFLVSFMVDARGGSMRGSRHHGMRIIIPPRKCTAPTRITCRLVKRHKLANPPPHGERRGISSRLVEMGPAGAQFLGPVIVEIPHFGSMRGKERELIVLRSENGETWKEHQFDSKNEDLTELLNGMDEELDSPEELGKKRICRIITKDFPQYFAVVSRIKQESNQIGPEGGILSSTTVPLVQASFPEGALTKRIRVGLQAQPVPDEIVKKILGNKATFSPIVTVEPRRRKFHKPITMTIPVPPPSGEGVSNGYKGDTTPNLRLLCSITGGTSPAQWEDITGTTPLTFIKDCVSFTTNVSARFWLADCHQVLETVGLATQLYRELICVPYMAKFVVFAKMNDPVESSLRCFCMTDDKVDKTLEQQENFEEVARSKDIEVLEGKPIYVDCYGNLAPLTKGGQQLVFNFYSFKENRLPFSIKIRDTSQEPCGRLSFLKERKTTKGLPQTAVCNLNITLPAHKKETESDQDDEIEKTDRRQSFASLALRKRYSYLTEPGMIERSTGATRSLPTTYSYKPFFSTRPYQSWTTAPITVPGPAKSGFTSLSSSSSNTPSASPLKSIWSVSTPSPIKSTLGASTTSSVKSISDVASPIRSLRTMSSPIKTVVSQSPYNIQVSSGTLARAPAVTEATPLKGLASNSTFSSRTSPVTTAGSLLERSSITMTPPASPKSNINMYSSSLPFKSIITSAAPLISSPLKSVVSPVKSRVDVISSAKITMASSLSSPVKQMPGHAEVALVNGSISPLKYASSSTLINGCKATATLQEKISSATNSVSSVVSAATDTVEKVFSTTTAMPFSPLRSYVSAAPSAFQSLRTPSASALYTSLGSSISATTSSVTSSIITVPVYSVVNVLPEPALKKLPDSNSFTKSAAALLSPIKTLTTETHPQPHFSRTSSPVKSSLFLAPSALKLSTPSSLSSSQEILKDVAEMKEDLMRMTAILQTDVPEEKPFQPELPKEGRIDDEEPFKIVEKVKEDLVKVSEILKKDVCVDNKGSPKSPKSDKGHSPEDDWIEFSSEEIREARQQAAASQSPSLPERVQVKAKAASEKDYNLTKVIDYLTNDIGSSSLTNLKYKFEDAKKDGEGGQKRVLKPAIALQEHKLKMPPASMRTSTSEKELCKMADSFFGTDTILESPDDFSQHDQDKSPLSDSGFETRSEKTPSAPQSAETTGPKPLFHEVPIPPVITETRTEVVHVIRSYDPSAGDVPQTQPEEPVSPKPSPTFMELEPKPTTSSIKEKVKAFQMKASSEEDDHNRVLSKGMRVKEETHITTTTRMVYHSPPGGEGASERIEETMSVHDIMKAFQSGRDPSKELAGLFEHKSAVSPDVHKSAAETSAQHAEKDNQMKPKLERIIEVHIEKGNQAEPTEVIIRETKKHPEKEMYVYQKDLSRGDINLKDFLPEKHDAFPCSEEQGQQEEEELTAEESLPSYLESSRVNTPVSQEEDSRPSSAQLISDDSYKTLKLLSQHSIEYHDDELSELRGESYRFAEKMLLSEKLDVSHSDTEESVTDHAGPPSSELQGSDKRSREKIATAPKKEILSKIYKDVSENGVGKVSKDEHFDKVTVLHYSGNVSSPKHAMWMRFTEDRLDRGREKLIYEDRVDRTVKEAEEKLTEVSQFFRDKTEKLNDELQSPEKKARPKNGKEYSSQSPTSSSPEKVLLTELLASNDEWVKARQHGPDGQGFPKAEEKAPSLPSSPEKMVLSQQTEDSKSTVEAKGSISQSKAPDGPQSGFQLKQSKLSSIRLKFEQGTHAKSKDMSQEDRKSDGQSRIPVKKIQESKLPVYQVFAREKQQKAIDLPDESVSVQKDFMVLKTKDEHAQSNEIVVNDSGSDNVKKQRTEMSSKAMPDSFSEQQAKDLACHITSDLATRGPWDKKVFRTWESSGATNNKSQKEKLSHVLVHDVRENHIGHPESKSVDQKNEFMSVTERERKLLTNGSLSEIKEMTVKSPSKKVLYREYVVKEGDHPGGLLDQPSRRSESSAVSHIPVRVADERRMLSSNIPDGFCEQSAFPKHELSQKLSQSSMSKETVETQHFNSIEDEKVTYSEISKVSKHQSYVGLCPPLEETETSPTKSPDSLEFSPGKESPSSDVFDHSPIDGLEKLAPLAQTEGGKEIKTLPVYVSFVQVGKQYEKEIQQGGVKKIISQECKTVQETRGTFYTTRQQKQPPSPQGSPEDDTLEQVSFLDSSGKSPLTPETPSSEEVSYEFTSKTPDSLIAYIPGKPSPIPEVSEESEEEEQAKSTSLKQTTVEETAVEREMPNDVSKDSNQRPKNNRVAYIEFPPPPPLDADQIESDKKHHYLPEKEVDMIEVNLQDEHDKYQLAEPVIRVQPPSPVPPGADVSDSSDDESIYQPVPVKKYTFKLKEVDDEQKEKPKASAEKASNQKELESNGSGKDNEFGLGLDSPQNEIAQNGNNDQSITECSIATTAEFSHDTDATEIDSLDGYDLQDEDDGLTESDSKLPIQAMEIKKDIWNTEGILKPADRSFSQSKLEVIEEEGKVGPDEDKPPSKSSSSEKTPDKTDQKSGAQFFTLEGRHPDRSVFPDTYFSYKVDEEFATPFKTVATKGLDFDPWSNNRGDDEVFDSKSREDETKPFGLAVEDRSPATTPDTTPARTPTDESTPTSEPNPFPFHEGKMFEMTRSGAIDMSKRDFVEERLQFFQIGEHTSEGKSGDQGEGDKSMVTATPQPQSGDTTVETNLERNVETPTVEPNPSIPTSGECQEGTSSSGSLEKSAAATNTSKVDPKLRTPIKMGISASTMTMKKEGPGEITDKIEAVMTSCQGLENETITMISNTANSQMGVRPHEKHDFQKDNFNNNNNLDSSTIQTDNIMSNIVLTEHSAPTCTTEKDNPVKVSSGKKTGVLQGHCVRDKQKVLGEQQKTKELIGIRQKSKLPIKATSPKDTFPPNHMSNTKASKMKQVSQSEKTKALTTSSCVDVKSRIPVKNTPRDNIIAVRKACATQKQGQPEKGKAKQLPSKLPVKVRSTCVTTTTTTATTTTTTTTTTTTSCTVKVRKSQLKEVCKHSIEYFKGISGETLKLVDRLSEEEKKMQSELSDEEESTSRNTSLSETSRGGQPSVTTKSARDKKTEAAPLKSKSEKAGSEKRSSRRTGPQSPCERTDIRMAIVADHLGLSWTELARELNFSVDEINQIRVENPNSLISQSFMLLKKWVTRDGKNATTDALTSVLTKINRIDIVTLLEGPIFDYGNISGTRSFADENNVFHDPVDGWQNETSSGNLESCAQARRVTGGLLDRLDDSPDQCRDSITSYLKGEAGKFEANGSHTEITPEAKTKSYFPESQNDVGKQSTKETLKPKIHGSGHVEEPASPLAAYQKSLEETSKLIIEETKPCVPVSMKKMSRTSPADGKPRLSLHEEEGSSGSEQKQGEGFKVKTKKEIRHVEKKSHS

SEQ ID NO: 4918 - protein, 330 aa, Homo Sapiens
MELLSTPHSIEINNITCDSFRISWAMEDSDLERVTHYFIDLNKKENKNSNKFKHRDVPTKLVAKAVPLPMTVRGHWFLSPRTEYSVAVQTAVKQSDGEYLVSGWSETVEFCTGDYAKEHLAQLQEKAEQIAGRMLRFSVFYRNHHKEYFQHARTHCGNMLQPYLKDNSGSHGSPTSGMLHGVFFSCNTEFNTGQPPQDSPYGRWRFQIPAQRLFNPSTNLYFADFYCMYTAYHYAILVLAPKGSLGDRFCRDRLPLLDIACNKFLTCSVEDGELVFRHAQDLILEIIYTEPVDLSLGTLGEISGHQLMSLSTADAKKDPSCKTCNISVGR

SEQ ID NO: 4919 - protein, 1157 aa, Homo Sapiens
QHVSAEVELRGPGMKGSSLSSESSPVSSPATNHSSPASTPKRVPMGPIIVPPGGHSVPSTPPVVTIAPTKTVNGVWRSESRQDAGPRSSSGGRERLIVEPPLPQEKAGGPAIPSHLLSTPYPFGLSPSSVVQDSRFPPLNLQRPVHHVVPPSTVTEDYLRSFRPYHTTDDLRMSSLPPLGLDPATAAAYYHPSYLAPHPFPHPAFRMDDSYCLSALRSPFYPIPTPGSLPPLHPSAMHLHLSGVRYPPELSHSSLAALHSERMSGLSAERLQMDEELRREREREREREREREADREREKEREREREKEREQEKEREREKERERELERQREQRAREKELLAAKALEPSFLPVAELHGLRGHATEERGKPSEQLTPTRAEKLKDASLQAPKPVQHPLHPVPTPHHTVPSLISNHGIFSLPSSSAATALLIQRTNEEEKWLARQRRLRQEKEDRQSQVSEFRQQVLEQHLDMGRPPVPAEAEHRPESTTRPGPNRHEPGGRDPPQHFGGPPPLISPKPQLHAAPTALWNPVSLMDNTLETRRAESHSLHSHPAAFEPSRQAAVPLVKVERVFCPEKAEEGPRKREPAPLDKYQPPPPPPREGGSLEHQPFLPGPGPFLAELEKSTQTILGQQRASLPQAATFGELSGPLKPGSPYRPPVPRAPDPAYIYDEFLQQRRRLVSKLDLEERRRREAQEKGYYYDLDDSYDESDEEEVRAHLRCVAEQPPLKLDTSSEKLEFLQLFGLTTQQQKEELVAQKRRKRRRMLRERSPSPPTIQSKRQTPSPRLALSTRYSPDEMNNSPNFEEKKKFLTIFNLTHISAEKRKDKERLVEMLRAMKQKALSAAVADSLTNSPRDSPAVSLSEPATQQASLDVEKPVGVAASLSDIPKAAEPGKLEQVRPQELSRVQELAPASGEKARLSEAPGGKKSLSMLHYIRGAAPKDIPVPLSHSTNGKSKPWEPFVAEEFAHQFHESVLQSTQKALQKHKGSVAVLSAEQNHKVDTSVHYNIPELQSSSRAPPPQHNGQQEPPTARKGPPTQELDRDSEEEEEEDDEDGEDEEEVPKRKWQGIEAVFEAYQEHIEEQNLERQVLQTQCRRLEARHYSLSLTAEQLSHSVAELRSQKQKMVSERERLQAELDHLRKCLALPAMHWPRGYLKGYPR

SEQ ID NO: 4920 - protein, 381 aa, Homo Sapiens
MAESHLLQWLLLLLPTLCGPGTAAWTTSSLACAQGPEFWCQSLEQALQCRALGHCLQEVWGHVGADDLCQECEDIVHILNKMAKEAIFQDTMRKFLEQECNVLPLKLLMPQCNQVLDDYFPLVIDYFQNQIDSNGICMHLGLCKSRQPEPEQEPGMSDPLPKPLRDPLPDPLLDKLVLPVLPGALQARPGPHTQDLSEQQFPIPLPYCWLCRALIKRIQAMIPKGALRVAVAQVCRVVPLVAGGICQCLAERYSVILLDTLLGRMLPQLVCRLVLRCSMDDSAGPRSPTGEWLPRDSECHLCMSVTTQAGNSSEQAIPQAMLQACVGSWLDREKCKQFVEQHTPQLLTLVPRGWDAHTTCQALGVCGTMSSPLQCIHSPDL

SEQ ID NO: 4921 - protein, 577 aa, Homo Sapiens
MTELAGASSSCCHRPAGRGAMQSVLHHFQRLRGREGGSHFINTSSPRGEAKMSITSDEVNFLVYRYLQESGFSHSAFTFGIESHISQSNINGTLVPPAALISILQKGLQYVEAEISINEDGTVFDGRPIESLSLIDAVMPDVVQTRQQAFREKLAQQQASAAAAAAAATAAATAATTTSAGVSHQNPSKNREATVNGEENRAHSVNNHAKPMEIDGEVEIPSSKATVLRGHESEVFICAWNPVSDLLASGSGDSTARIWNLNENSNGGSTQLVLRHCIREGGHDVPSNKDVTSLDWNTNGTLLATGSYDGFARIWTEDGNLASTLGQHKGPIFALKWNRKGNYILSAGVDKTTIIWDAHTGEAKQQFPFHSAPALDVDWQNNTTFASCSTDMCIHVCRLGCDRPVKTFQGHTNEVNAIKWDPSGMLLASCSDDMTLKIWSMKQEVCIHDLQAHNKEIYTIKWSPTGPATSNPNSNIMLASASFDSTVRLWDIERGVCTHTLTKHQEPVYSVAFSPDGKYLASGSFDKCVHIWNTQSGNLVHSYRGTGGIFEVCWNARGDKVGASASDGSVCVLDLRK

SEQ ID NO: 4922 - protein, 534 aa, Homo Sapiens
MIWYILIIGILLPQSLAHPGFFTSIGQMTDLIHTEKDLVTSLKDYIKAEEDKLEQIKKWAEKLDRLTSTATKDPEGFVGHPVNAFKLMKRLNTEWSELENLVLKDMSDGFISNLTIQRPVLSNDEDQVGAAKALLRLQDTYNLDTDTISKGNLPGVKHKSFLTAEDCFELGKVAYTEADYYHTELWMEQALRQLDEGEISTIDKVSVLDYLSYAVYQQGDLDKALLLTKKLLELDPEHQRANGNLKYFEYIMAKEKDVNKSASDDQSDQKTTPKKKGVAVDYLPERQKYEMLCRGEGIKMTPRRQKKLFCRYHDGNRNPKFILAPAKQEDEWDKPRIIRFHDIISDAEIEIVKDLAKPRLSRATVHDPETGKLTTAQYRVSKSAWLSGYENPVVSRINMRIQDLTGLDVSTAEELQVANYGVGGQYEPHFDFARKDEPDAFKELGTGNRIATWLFYMSDVSAGGATVFPEVGASVWPKKGTAVFWYNLFASGEGDYSTRHAACPVLVGNKWVSNKWLHERGQEFRRPCTLSELE

SEQ ID NO: 4923 - protein, 494 aa, Homo Sapiens
MSFGSEHYLCSSSSYRKVFGDGSRLSARLSGAGGAGASVESLSRSNVASSAACSSASSLGLGLAYARPPASDGLDLSQAAARTNEYKIIRSNEKEQLQGLNDRFAVFIEKVHQLETQNRALEAELARCDTHAEPSRVGQLFQREPRHLPQLEEASSARSQALLERDGLAEEVQRLRARCEEESRGRERRARLKRQQRDVDGATLARLDLEKKVESLLDELAFVRQVHDEEVAELLATLQRSSQAAAEVDVTVAKPDLTAALREIRAQYESLAAKNLQSAEEWYKSKFANLNEQAARTTEAIRASRDQIHEYRRLQARTIEIEGLRGANESLERQILELEERHSAEVAGYQDSIGQLENDLRNTKSEMARHLREYQDLLNVKMALDIEIAAYRKLLEGEETRFSTSGLSISGLNPLPNPSYLLPPRILSATTSKVSSTGLSLKKEEEEEEASKVASKKTSQIGESFEEILEETVISTKKTEKSNIEETTISSQKI

SEQ ID NO: 4924 - protein, 1278 aa, Homo Sapiens
MTARGLALGLLLLLLCPAQVFSQSCVWYGECGIAYGDKRYNCEYSGPPKPLPKDGYDLVQELCPGFFFGNVSLCCDVRQLQTLKDNLQLPLQFLSRCPSCFYNLLNLFCELTCSPRQSQFLNVTATEDYVDPVTNQTKTNVKELQYYVGQSFANAMYNACRDVEAPSSNDKALGLLCGKDADACNATNWIEYMFNKDNGQAPFTITPVFSDFPVHGMEPMNNATKGCDESVDEVTAPCSCQDCSIVCGPKPQPPPPPAPWTILGLDAMYVIMWITYMAFLLVFFGAFFAVWCYRKRYFVSEYTPIDSNIAFSVNASDKGEASCCDPVSAAFEGCLRRLFTRWGSFCVRNPGCVIFFSLVFITACSSGLVFVRVTTNPVDLWSAPSSQARLEKEYFDQHFGPFFRTEQLIIRAPLTDKHIYQPYPSGADVPFGPPLDIQILHQVLDLQIAIENITASYDNETVTLQDICLAPLSPYNTNCTILSVLNYFQNSHSVLDHKKGDDFFVYADYHTHFLYCVRAPASLNDTSLLHDPCLGTFGGPVFPWLVLGGYDDQNYNNATALVITFPVNNYYNDTEKLQRAQAWEKEFINFVKNYKNPNLTISFTAERSIEDELNRESDSDVFTVVISYAIMFLYISLALGHIKSCRRLLVDSKVSLGIAGILIVLSSVACSLGVFSYIGLPLTLIVIEVIPFLVLAVGVDNIFILVQAYQRDERLQGETLDQQLGRVLGEVAPSMFLSSFSETVAFFLGALSVMPAVHTFSLFAGLAVFIDFLLQITCFVSLLGLDIKRQEKNRLDIFCCVRGAEDGTSVQASESCLFRFFKNSYSPLLLKDWMRPIVIAIFVGVLSFSIAVLNKVDIGLDQSLSMPDDSYMVDYFKSISQYLHAGPPVYFVLEEGHDYTSSKGQNMVCGGMGCNNDSLVQQIFNAAQLDNYTRIGFAPSSWIDDYFDWVKPQSSCCRVDNITDQFCNASVVDPACVRCRPLTPEGKQRPQGGDFMRFLPMFLSDNPNPKCGKGGHAAYSSAVNILLGHGTRVGATYFMTYHTVLQTSADFIDALKKARLIASNVTETMGINGSAYRVFPYSVFYVFYEQYLTIIDDTIFNLGVSLGAIFLVTMVLLGCELWSAVIMCATIAMVLVNMFGVMWLWGISLNAVSLVNLVMSCGISVEFCSHITRAFTVSMKGSRVERAEEALAHMGSSVFSGITLTKFGGIVVLAFAKSQIFQIFYFRMYLAMVLLGATHGLIFLPVLLSYIGPSVNKAKSCATEERYKGTERERLLNF

SEQ ID NO: 4925 - protein, 252 aa, Homo Sapiens
MRGQGRKESLSDSRDLDGSYDQLTGHPPGPTKKALKQRFLKLLPCCGPQALPSVSENSVDDEFELSTVCHRPEGLEQLQEQTKFTRKELQVLYRGFKNECPSGIVNEENFKQIYSQFFPQGDSSTYATFLFNAFDTNHDGSVSFEDFVAGLSVILRGTVDDRLNWAFNLYDLNKDGCITKEEMLDIMKSIYDMMGKYTYPALREEAPREHVESFFQKMDRNKDGVVTIEEFIESCQKDENIMRSMQLFDNVI

SEQ ID NO: 4926 - protein, 469 aa, Homo Sapiens [sequence omitted]

SEQ ID NO: 4927 - protein, 3113 aa, Homo Sapiens
MSWALEEWKEGLPTRALQKIQELEGQLDKLKKEKQQRQFQLDSLEAAPQKQTQKVENEKTEGTNLKRENQRLMEICESLEKTKQKISHELQVKESQVNFQEGQLNSGKKQIEKLEQELKRCKSELERSQQAAQSADVSLNPCNTPQKIFTTPLTPSQYYSGSKYEDLKEKYNKEVEERKRLEAEVKALQAKKASQTLPQATMNHRDIARHQASSSVFSWQQEKTPSHLSSNSQRTPIRRDFSASYFSGEQEVTPSRSTLQIGKRDANSSFFDNSSSPHLLDQLKAQNQELRNKINELELRLQGHEKEMKGQVNKFQELQLQLEKAKVELIEKEKVLNKCRDELVRTTAQYDQASTKYTALEQKLKKLTEDLSCQRQNAESARCSLEQKIKEKEKEFQEELSRQQRSFQTLDQECIQMKARLTQELQQAKNMHNVLQAELDKLTSVKQQLENNLEEFKQKLCRAEQAFQASQIKENELRRSMEEMKKENNLLKSHSEQKAREVCHLEAELKNIKQCLNQSQNFAEEMKAKNTSQETMLRDLQEKINQQENSLTLEKLKLAVADLEKQRDCSQDLLKKREHHIEQLNDKLSKTEKESKALLSALELKKKEYELKEEKTLFSCWKSENEKLLTQMESEKENLQSKINHLETCLKTQQIKSHEYNERVRTLEMDRENLSVEIRNLHNVLDSKSVEVETQKLAYMELQQKAEFSDQKHQKEIENMCLKTSQLTGQVEDLEHKLQLLSNEIMDKDRCYQDLHAEYESLRDLLKSKDASLVTNEDHQRSLLAFDQQPAMHHSFANIIGEQGSMPSERSECRLEADQSPKNSAILQNRVDSLEFSLESQKQMNSDLQKQCEELVQIKGEIEENLMKAEQMHQSFVAETSQRISKLQEDTSAHQNVVAETLSALENKEKELQLLNDKVETEQAEIQELKKSNHLLEDSLKELQLLSETLSLEKKEMSSIISLNKREIEELTQENGTLKEINASLNQEKMNLIQKSESFANYIDEREKSISELSDQYKQEKLILLQRCEETGNAYEDLSQKYKAAQEKNSKLECLLNECTSLCENRKNELEQLKEAFAKEHQEFLTKLAFAEERNQNLMLELETVQQALRSEMTDNQNNSKSEAGGLKQEIMTLKEEQNKMQKEVNDLLQENEQLMKVMKTKHECQNLESEPIRNSVKERESERNQCNFKPQMDLEVKEISLDSYNAQLVQLEAMLRNKELKLQESEKEKECLQHELQTIRGDLETSNLQDMQSQEISGLKDCEIDAEEKYISGPHELSTSQNDNAHLQCSLQTTMNKLNELEKICEILQAEKYELVTELNDSRSECITATRKMAEEVGKLLNEVKILNDDSGLLHGELVEDIPGGEFGEQPNEQHPVSLAPLDESNSYEHLTLSDKEVQMHFAELQEKFLSLQSEHKILHDQHCQMSSKMSELQTYVDSLKAENLVLSTNLRNFQGDLVKEMQLGLEEGLVPSLSSSCVPDSSSLSSLGDSSFYRALLEQTGDMSLLSNLEGAVSANQCSVDEVFCSSLQEENLTRKETPSAPAKGVEELESLCEVYRQSLEKLEEKMESQGIMKNKEIQELEQLLSSERQELDCLRKQYLSENEQWQQKLTSVTLEMESKLAAEKKQTEQLSLELEVARLQLQGLDLSSRSLLGIDTEDAIQGRNESCDISKEHTSETTERTPKHDVHQICDKDAQQDLNLDIEKITETGALKPTGECSGEQSPDTNYEPPGEDKTQGSSECISELSFSGPNALVPMDFLGNQEDIHNLQLRVKETSNENLRLLHVIEDRDRKVESLLNEMKELDSKLHLQEVQLMTKIEACIELEKIVGELKKENSDLSEKLEYFSCDHQELLQRVETSEGLNSDLEMHADKSSREDIGDNVAKVNDSWKERFLDVENELSRIRSEKASIEHEALYLEADLEVVQTEKLCLEKDNENKQKVIVCLEEELSVVTSERNQLRGELDTMSKKTTALDQLSEKMKEKTQELESHQSECLHCIQVAEAEVKEKTELLQTLSSDVSELLKDKTHLQEKLQSLEKDSQALSLTKCELENQIAQLNKEKELLVKESESLQARLSESDYEKLNVSKALEAALVEKGEFALRLSSTQEEVHQLRRGIEKLRVRIEADEKKQLHIAEKLKERERENDSLKDKVENLERELQMSEENQELVILDAENSKAEVETLKTQIEEMARSLKVFELDLVTLRSEKENLTKQIQEKQGQLSELDKLLSSFKSLLEEKEQAEIQIKEESKTAVEMLQNQLKELNEAVAALCGDQEIMKATEQSLDPPIEEEHQLRNSIEKLRARLEADEKKQLCVLQQLKESEHHADLLKGRVENLERELEIARTNQEHAALEAENSKGEVETLKAKIEGMTQSLRGLELDVVTIRSEKENLTNELQKEQERISELEIINSSFENILQEKEQEKVQMKEKSSTAMEMLQTQLKELNERVAALHNDQEACKAKEQNLSSQVECLELEKAQLLQGLDEAKNNYIVLQSSVNGLIQEVEDGKQKLEKKDEEISRLKNQIQDQEQLVSKLSQVEGEHQLWKEQNLELRNLTVELEQKIQVLQSKNASLQDTLEVLQSSYKNLENELELTKMDKMSFVEKVNKMTAKETELQREMHEMAQKTAELQEELSGEKNRLAGELQLLLEEIKSSKDQLKELTLENSELKKSLDCMHKDQVEKEGKVREEIAEYQLRLHEAEKKHQALLLDTNKQYEVEIQTYREKLTSKEECLSSQKLEIDLLKSSKEELNNSLKATTQILEELKKTKMDNLKYVNQLKKENERAQGKMKLLIKSCKQLEEEKEILQKELSQLQAAQEKQKTGTVMDTKVDELTTEIKELKETLEEKTKEADEYLDKYCSLLISHEKLEKAKEMLETQVAHLCSQQSKQDSRGSPLLGPVVPGPSPIPSVTEKRLSSGQNKASGKRQRSSGIWENGGGPTPATPESFSKKSKKAVMSGIHPAEDTEGTEFEPEGLPEVVKKGFADIPTGKTSPYILRRTTMATRTSPRLAAQKLALSPLSLGKENLAESSKPTAGGSRSQKVKVAQRSPVDSGTILREPTTKSVPVNNLPERSPTDSPREGLRVKRGRLVPSPKAGLESKGSENCKVQ

SEQ ID NO: 4928 - protein, 431 aa, Homo Sapiens [sequence omitted]

SEQ ID NO: 4929 - protein, 374 aa, Homo Sapiens
MWFLTTLLLWVPVDGQVDTTKAVITLQPPWVSVFQEETVTLHCEVLHLPGSSSTQWFLNGTATQTSTPSYRITSASVNDSGEYRCQRGLSGRSDPIQLEIHRGWLLLQVSSRVFTEGEPLALRCHAWKDKLVYNVLYYRNGKAFKFFHWNSNLTILKTNISHNGTYHCSGMGKHRYTSAGISVTVKELFPAPVLNASVTSPLLEGNLVTLSCETKLLLQRPGLQLYFSFYMGSKTLRGRNTSSEYQILTARREDSGLYWCEAATEDGNVLKRSPELELQVLGLQLPTPVWFHVLFYLAVGIMFLVNTVLWVTIRKELKRKKKWDLEISLDSGHEKKVISSLQEDRHLEEELKCQEQKEEQLQEGVHRKEPQGAT

SEQ ID NO: 4930 - protein, 29 aa, Homo Sapiens
MRPSGTAGAALLALLAALCPASRALEEKK

SEQ ID NO: 4931 - protein, 418 aa, Homo Sapiens
MSIEIPAGLTELLQGFTVEVLRHQPADLLEFALQHFTRLQQENERKGTARFGHEGRTWGDLGAAAGGGTPSKGVNFAEEPMQSDSEDGEEEEAAPADAGAFNAPVINRFTRRASVCAEAYNPDEEEDDAESRIIHPKTDDQRNRLQEACKDILLFKNLDPEQMSQVLDAMFEKLVKDGEHVIDQGDDGDNFYVIDRGTFDIYVKCDGVGRCVGNYDNRGSFGELALMYNTPRAATITATSPGALWGLDRVTFRRIIVKNNAKKRKMYESFIESLPFLKSLEFSERLKVVDVIGTKVYNDGEQIIAQGDSADSFFIVESGEVKITMKRKGKSEVEENGAVEMPRCSRGQYFGELALVTNKPRAASAHAIGTVKCLAMDVQAFERLLGPCMEIMKRNIATYEEQLVALFGTNMDIVEPTA

SEQ ID NO: 4932 - protein, 443 aa, Homo Sapiens [sequence omitted]

SEQ ID NO: 4933 - protein, 136 aa, Homo Sapiens
MSAAVTAGKLARAPADPGKAGVPGVAAPGAPAAAPPAKEIPEVLVDPRSRRRYVRGRFLGKGGFAKCFEISDADTKEVFAGKIVPKSLLLKPHQREKMSMEISIHRSLAHQHVVGFHGFFEDTDFVFVVLELCRRR

SEQ ID NO: 4934 - protein, 662 aa, Homo Sapiens
MVVSEVDIAKADPAAASHPLLLNGDATVAQKNPGSVAENNLCSQYEEKVRPCIDLIDSLRALGVEQDLALPAIAVIGDQSSGKSSVLEALSGVALPRGSGIVTRCPLVLKLKKLVNEDKWRGKVSYQDYEIEISDASEVEKEINKAQNAIAGEGMGISHELITLEISSRDVPDLTLIDLPGITRVAVGNQPADIGYKIKTLIKKYIQRQETISLVVVPSNVDIATTEALSMAQEVDPEGDRTIGILTKPDLVDKGTEDKVVDVVRNLVFHLKKGYMIVKCRGQQEIQDQLSLSEALQREKIFFENHPYFRDLLEEGKATVPCLAEKLTSELITHICKSLPLLENQIKETHQRITEELQKYGVDIPEDENEKMFFLIDKINAFNQDITALMQGEETVGEEDIRLFTRLRHEFHKWSTIIENNFQEGHKILSRKIQKFENQYRGRELPGFVNYRTFETIVKQQIKALEEPAVDMLHTVTDMVRLAFTDVSIKNFEEFFNLHRTAKSKIEDIRAEQEREGEKLIRLHFQMEQIVYCQDQVYRGALQKVREKELEEEKKKKSWDFGAFQSSSATDSSMEEIFQHLMAYHQEASKRISSHIPLIIQFFMLQTYGQQLQKAMLQLLQDKDTYSWLLKERSDTSDKRKFLKERLARLTQARRRLAQFPG

SEQ ID NO: 4935 - protein, 477 aa, Homo Sapiens [sequence omitted]

SEQ ID NO: 4936 - protein, 422 aa, Homo Sapiens
MGKAKVPASKRAPSSPVAKPGPVKTLTRKKNKKKKRFWKSKAREVSKKPASGPGAVVRPPKAPEDFSQNWKALQEWLLKQKSQAPEKPLVISQMGSKKKPKIIQQNKKETSPQVKGEEMPAGKDQEASRGSVPSGSKMDRRAPVPRTKASGTEHNKKGTKERTNGDIVPERGDIEHKKRKAKEAAPAPPTEEDIWFDDVDPPDIEAAIGPEAAKIARKQLGQSEGSVSLSLVKEQAFGGLTRALALDCEMVGVGPKGEESMAARVSIVNQYGKCVYDKYVKPTEPVTDYRTAVSGIRPENLKQGEELEVVQKEVAEMLKGRILVGHALHNDLKVLFLDHPKKKIRDTQKYKPFKSQVKSGRPSLRLLSEKILGLQVQQAEHCSIQDAQAAMRLYVMVKKEWESMARDRRPLLTAPDHCSDDA

SEQ ID NO: 4937 - protein, 758 aa, Homo Sapiens [sequence omitted]

SEQ ID NO: 4938 - protein, 273 aa, Homo Sapiens
MTFDDLKIQTVKDQPDEKSNGKKAKGLQFLYSPWWCLAAATLGVLCLGLVVTIMVLGMQLSQVSDLLTQEQANLTHQKKKLEGQISARQQAEEASQESENELKEMIETLARKLNEKSKEQMELHHQNLNLQETLKRVANCSAPCPQDWIWHGENCYLFSSGSFNWEKSQEKCLSLDAKLLKINSTADLDFIQQAISYSSFPFWMGLSRRNPSYPWLWEDGSPLMPHLFRVRGAVSQTYPSGTCAYIQRGAVYAENCILAAFSICQKKANLRAQ

SEQ ID NO: 4939 - protein, 509 aa, Homo Sapiens
MAERAALEELVKLQGERVRGLKQQKASAELIEEEVAKLLKLKAQLGPDESKQKFVLKTPKGTRDYSPRQMAVREKVFDVIIRCFKRHGAEVIDTPVFELKETLMGKYGEDSKLIYDLKDQGGELLSLRYDLTVPFARYLAMNKLTNIKRYHIAKVYRRDNPAMTRGRYREFYQCDFDIAGNFDPMIPDAECLKIMCEILSSLQIGDFLVKVNDRRILDGMFAICGVSDSKFRTICSSVDKLDKVSWEEVKNEMVGEKGLAPEVADRIGDYVQQHGGVSLVEQLLQDPKLSQNKQALEGLGDLKLLFEYLTLFGIDDKISFDLSLARGLDYYTGVIYEAVLLQTPAQAGEEPLGVGSVAAGGRYDGLVGMFDPKGRKVPCVGLSIGVERIFSIVEQRLEALEEKIRTTETQVLVASAQKKLLEERLKLVSELWDAGIKAELLYKKNPKLLNQLQYCEEAGIPLVAIIGEQELKDGVIKLRSVTSREEVDVRREDLVEEIKRRTGQPLCIC

SEQ ID NO: 4940 - protein, 1093 aa, Homo Sapiens
MAGAAGLTAEVSWKVLERRARTKRSGSVYEPLKSINLPRPDNETLWDKLDHYYRIVKSTLLLYQSPTTGLFPTKTCGGDQKAKIQDSLYCAAGAWALALAYRRIDDDKGRTHELEHSAIKCMRGILYCYMRQADKVQQFKQDPRPTTCLHSVFNVHTGDELLSYEEYGHLQINAVSLYLLYLVEMISSGLQIIYNTDEVSFIQNLVFCVERVYRVPDFGVWERGSKYNNGSTELHSSSVGLAKAALEAINGFNLFGNQGCSWSVIFVDLDAHNRNRQTLCSLLPRESRSHNTDAALLPCISYPAFALDDEVLFSQTLDKVVRKLKGKYGFKRFLRDGYRTSLEDPNRCYYKPAEIKLFDGIECEFPIFFLYMMIDGVFRGNPKQVQEYQDLLTPVLHHTTEGYPVVPKYYYVPADFVEYEKNNPGSQKRFPSNCGRDGKLFLWGQALYIIAKLLADELISPKDIDPVQRYVPLKDQRNVSMRFSNQGPLENDLVVHVALIAESQRLQVFLNTYGIQTQTPQQVEPIQIWPQQELVKAYLQLGINEKLGLSGRPDRPIGCLGTSKIYRILGKTVVCYPIIFDLSDFYMSQDVFLLIDDIKNALQFIKQYWKMHGRPLFLVLIREDNIRGSRFNPILDMLAALKKGIIGGVKVHVDRLQTLISGAVVEQLDFLRISDTEELPEFKSFEELEPPKHSKVKRQSSTPSAPELGQQPDVNISEWKDKPTHEILQKLNDCSCLASQAILLGILLKREGPNFITKEGTVSDHIERVYRRAGSQKLWLAVRYGAAFTQKFSSSIAPHITTFLVHGKQVTLGAFGHEEEVISNPLSPRVIQNIIYYKCNTHDEREAVIQQELVIHIGWIISNNPELFSGMLKIRIGWIIHAMEYELQIRGGDKPALDLYQLSPSEVKQLLLDILQPQQNGRCWLNRRQIDGSLNRTPTGFYDRVWQILERTPNGIIVAGKHLPQQPTLSDMTMYEMNFSLLVEDTLGNIDQPQYRQIVVELLMVVSIVLERNPELEFQDKVDLDRLVKEAFNEFQKDQSRLKEIEKQDDMTSFYNTPPLGKRGTCSYLTKAVMNLLLEGEVKPNNDDPCLIS

SEQ ID NO: 4941 - protein, 179 aa, Homo Sapiens [sequence omitted]

SEQ ID NO: 4942 - protein, 325 aa, Homo Sapiens
QGMDSKQQCVKLNDGHFMPVLGFGTYAPPEVPRSKALEVTKLAIEAGFRHIDSAHLYNNEEQVGLAIRSKIADGSVKREDIFYTSKLWSTFHRPELVRPALENSLKKAQLDYVDLYLIHSPMSLKPGEELSPTDENGKVIFDIVDLCTTWEAMEKCKDAGLAKSIGVSNFNRRQLEMILNKPGLKYKPVCNQVECHPYFNRSKLLDFCKSKDIVLVAYSALGSQRDKRWVDPNSPVLLEDPVLCALAKKHKRTPALIALRYQLQRGVVVLAKSYNEQRIRQNVQVFEFQLTAEDMKAIDGLDRNLHYFNSDSFASHPNYPYSDEY

SEQ ID NO: 4943 - protein, 1447 aa, Homo Sapiens
MFRAGEASKRPLPGPSPPRVRSVEVARGRAGYGFTLSGQAPCVLSCVMRGSPADFVGLRAGDQILAVNEINVKKASHEDVVKLIGKCSGVLHMVIAEGVGRFESCSSDEEGGLYEGKGWLKPKLDSKALGINRAERVVEEMQSGGIFNMIFENPSLCASNSEPLKLKQRSLSESAATRFDVGHESINNPNPNMLSKEEISKVIHDDSVFSIGLESHDDFALDASILNVAMIVGYLGSIELPSTSSNLESDSLQAIRGCMRRLRAEQKIHSLVTMKIMHDCVQLSTDKAGVVAEYPAEKLAFSAVCPDDRRFFGLVTMQTNDDGSLAQEEEGALRTSCHVFMVDPDLFNHKIHQGIARRFGFECTADPDTNGCLEFPASSLPVLQFISVLYRDMGELIEGMRARAFLDGDADAHQNNSTSSNSDSGIGNFHQEEKSNRVLVVDLGGSSSRHGPGGSAWDGVGGRGAQPWGAPWTGPFCPDPEGSPPFEAAHQTDRFWDLNKHLGPASPVEVPPASLRSSVPPSKRGTVGAGCGFNQRWLPVHVLREWQCGHTSDQDSYTDSTDGWSSINCGTLPPPMSKIPADRYRVEGSFAQPPLNAPKREWSRKAFGMQSIFGPHRNVRKTKEDKKGSKFGRGTGLTQPSQRTSARRSFGRSKRFSITRSLDDLESATVSDGELTGADLKDCVSNNSLSSNASLPSVQSCRRLRERRVASWAVSFERLLQDPVGVRYFSDFLRKEFSEENILFWQACEYFNHVPAHDKKELSYRAREIFSKFLCSKATTPVNIDSQAQLADDVLRAPHPDMFKEQQLQIFNLMKFDSYTRFLKSPLYQECILAEVEGRALPDSQQVPSSPASKHSLGSDHSSVSTPKKLSGKSKSGRSLNEELGDEDSEKKRKGAFFSWSRTRSTGRSQKKREHGDHADDALHANGGLCRRESQGSVSSAGSLDLSEACRTLAPEKDKATKHCCIHLPDGTSCVVAVKAGFSIKDILSGLCERHGINGAAADLFLVGGDKPLVLHQDSSILESRDLRLEKRTLFRLDLVPINRSVGLKAKPTKPVTEVLRPVVARYGLDLSGLLVRLSGEKEPLDLGAPISSLDGQRVVLEEKDPSRGKASADKQKGVPVKQNTAVNSSSRNHSATGEERTLGKSNSIKIKGENGKNARDPRLSKREESIAKIGKKKYQKINLDEAEEFFELISKAQSNRADDQRGLLRKEDLVLPEFLRLPPGSTELTLPTPAAVAKGFSKRSATGNGRESASQPGEQWEPVQESSDSPSTSPGSASSPPGPPGTTPPGQKSPSGPFCTPQSPVSLAQEGTAQIWKRQSQEVEAGGIQTVEDEHVAELTLMGEGDISSPNSTLLPPPSTPQEVPGPSRPGSGTHGSRDLPVNRIIDVDLVTGSAPGRDGGIAGAQAGPGRSQASGGPPTSDLPGLGPVPGEPAKPKTSAHHATFV

SEQ ID NO: 4944 - protein, 1857 aa, Homo Sapiens
TYSGLFCVVVNPYKHLPIYSEKIVDMYKGKKRHEMPPHIYAIADTAYRSMLQDREDQSILCTGESGAGKTENTKKVIQYLAVVASSHKGKKDTSITGELEKQLLQANPILEAFGNAKTVKNDNSSRFGKFIRINFDVTGYIVGANIETYLLEKSRAIRQARDERTFHIFYYMIAGAKEKMRSDLLLEGFNNYTFLSNGFVPIPAAQDDEMFQETVEAMAIMGFSEEEQLSILKVVSSVLQLGNIVFKKERNTDQASMPDNTAAQKVCHLMGINVTDFTRSILTPRIKVGRDVVQKAQTKEQADFAVEALAKATYERLFRWILTRVNKALDKTHRQGASFLGILDIAGFEIFEVNSFEQLCINYTNEKLQQLFNHTMFILEQEEYQREGIEWNFIDFGLDLQPCIELIERPNNPPGVLALLDEECWFPKATDKSFVEKLCTEQGSHPKFQKPKQLKDKTEFSIIHYAGKVDYNASAWLTKNMDPLNDNVTSLLNASSDKFVADLWKDVDRIVGLDQMAKMTESSLPSASKTKKGMFRTVGQLYKEQLGKLMTTLRNTTPNFVRCIIPNHEKRSGKLDAFLVLEQLRCNGVLEGIRICRQGFPNRIVFQEFRQRYEILAANAIPKGFMDGKQACILMIKALELDPNLYRIGQSKIFFRTGVLAHLEEERDLKITDVIMAFQAMCRGYLARKAFAKRQQQLTAMKVIQRNCAAYLKLRNWQWWRLFTKVKPLLQVTRQEEEMQAKEDELQKTKERQQKAENELKELEQKHSQLTEEKNLLQEQLQAETELYAEAEEMRVRLAAKKQELEEILHEMEARLEEEEDRGQQLQAERKKMAQQMLDLEEQLEEEEAARQKLQLEKVTAEAKIKKLEDEILVMDDQNNKLSKERKLLEERISDLTTNLAEEEEKAKNLTKLKNKHESMISELEVRLKKEEKSRQELEKLKRKLEGDASDFHEQIADLQAQIAELKMQLAKKEEELQAALARLDDEIAQKNNALKKIRELEGHISDLQEDLDSERAARNKAEKQKRDLGEELEALKTELEDTLDSTATQQELRAKREQEVTVLKKALDEETRSHEAQVQEMRQKHAQAVEELTEQLEQFKRAKANLDKNKQTLEKENADLAGELRVLGQAKQEVEHKKKKLEAQVQELQSKCSDGERARAELNDKVHKLQNEVESVTGMLNEAEGKAIKLAKDVASLSSQLQDTQELLQEETRQKLNVSTKLRQLEEERNSLQDQLDEEMEAKQNLERHISTLNIQLSDSKKKLQDFASTVEALEEGKKRFQKEIENLTQQYEEKAAAYDKLEKTKNRLQQELDDLVVDLDNQRQLVSNLEKKQRKFDQLLAEEKNISSKYADERDRAEAEAREKETKALSLARALEEALEAKEELERTNKMLKAEMEDLVSSKDDVGKNVHELEKSKRALETQMEEMKTQLEELEDELQATEDAKLRLEVNMQALKGQFERDLQARDEQNEEKRRQLQRQLHEYETELEDERKQRALAAAAKKKLEGDLKDLELQADSAIKGREEAIKQLRKLQAQMKDFQRELEDARASRDEIFATAKENEKKAKSLEADLMQLQEDLAAAERARKQADLEKEELAEELASSLSGRNALQDEKRRLEARIAQLEEELEEEQGNMEAMSDRVRKATQQAEQLSNELATERSTAQKNESARQQLERQNKELRSKLHEMEGAVKSKFKSTIAALEAKIAQLEEQVEQEAREKQAATKSLKQKDKKLKEILLQVEDERKMAEQYKEQAEKGNARVKQLKRQLEEAEEESQRINANRRKLQRELDEATESNEAMGREVNALKSKLRRGNETSFVPSRRSGGRRVIENADGSEEETDTRDADFNGTKASE

SEQ ID NO: 4945 - protein, 686 aa, Homo Sapiens
MSVNSEKSSSSERPEPQQKAPLVPPPPPPPPPPPPPLPDPTPPEPEEEILGSDDEEQEDPADYCKGGYHPVKIGDLFNGRYHVIRKLGWGHFSTVWLCWDMQGKRFVAMKVVKSAQHYTETALDEIKLLKCVRESDPSDPNKDMVVQLIDDFKISGMNGIHVCMVFEVLGHHLLKWIIKSNYQGLPVRCVKSIIRQVLQGLDYLHSKCKIIHTDIKPENILMCVDDAYVRRMAAEPEWQKAGAPPPSGSAVSTAPQQKPIGKISKNKKKKLKKKQKRQAELLEKRLQEIEELEREAERKIIEENITSAAPSNDQDGEYCPEVKLKTTGLEEAAEAETAKDNGEAEDQEEKEDAEKENIEKDEDDVDQELANIDPTWIESPKTNGHIENGPFSLEQQLDDEDDDEEDCPNPEEYNLDEPNAESDYTYSSSYEQFNGELPNGRHKIPESQFPEFSTSLFSGSLEPVACGSVLSEGSPLTEQEESSPSHDRSRTVSASSTGDLPKAKTRAADLLVNPLDPRNRDKIRVKIADLGNACWVHKHFTEDIQTRQYRSIEVLIGAGYSTPADIWSTACMAFELATGDYLFEPHSGEDYSRDEDHIAHIIELLGSIPRHFALSGKYSREFFNRRGELRHITKLKPWSLFDVLVEKYGWPHEDAAQFTDFLIPMLEMVPEKRASAGECRHPWLNS

SEQ ID NO: 4946 - protein, 482 aa, Homo Sapiens
MVEKGPEVSGKRRGRNNAAASASAAAASAAASAACASPAATAASGAAASSASAAAASAAAAPNNGQNKSLAAAAPNGNSSSNSWEEGSSGSSSDEEHGGGGMRVGPQYQAVVPDFDPAKLARRSQERDNLGMLVWSPNQNLSEAKLDEYIAIAKEKHGYNMEQALGMLFWHKHNIEKSLADLPNFTPFPDEWTVEDKVLFEQAFSFHGKTFHRIQQMLPDKSIASLVKFYYSWKKTRTKTSVMDRHARKQKREREESEDELEEANGNNPIDIEVDQNKESKKEVPPTETVPQVKKEKHSTQAKNRAKRKPPKGMFLSQEDVEAVSANATAATTVLRQLDMELVSVKRQIQNIKQTNSALKEKLDGGIEPYRLPEVIQKCNARWTTEEQLLAVQAIRKYGRDFQAISDVIGNKSVVQVKNFFVNYRRRFNIDEVLQEWEAEHGKEETNGPSNQKPVKSPDNSIKMPEEEDEAPVLDVRYASAS

SEQ ID NO: 4947 - protein, 504 aa, Homo Sapiens
MRFFCARCCSFGPEMPAVQLLLLACLVWDVGARTAQLRKANDQSGRCQYTFSVASPNESSCPEQSQAMSVIHNLQRDSSTQRLDLEATKARLSSLESLLHQLTLDQAARPQETQEGLQRELGTLRRERDQLETQTRELETAYSNLLRDKSVLEEEKKRLRQENENLARRLESSSQEVARLRRGQCPQTRDTARAVPPGSREVSTWNLDTLAFQELKSELTEVPASRILKESPSGYLRSGEGDTGCGELVWVGEPLTLRTAETITGKYGVWMRDPKPTYPYTQETTWRIDTVGTDVRQVFEYDLISQFMQGYPSKVHILPRPLESTGAVVYSGSLYFQGAESRTVIRYELNTETVKAEKEIPGAGYHGQFPYSWGGYTDIDLAVDEAGLWVIYSTDEAKGAIVLSKLNPENLELEQTWETNIRKQSVANAFIICGTLYTVSSYTSADATVNFAYDTGTGISKTLTIPFKNRYKYSSMIDYNPLEKKLFAWDNLNMVTYDIKLSKM

SEQ ID NO: 4948 - protein, 301 aa, Homo Sapiens
MKSNPAIQAAIDLTAGAAGGTACVLTGQPFDTMKVKMQTFPDLYRGLTDCCLKTYSQVGFRGFYKGTSPALIANIAENSVLFMCYGFCQQVVRKVAGLDKQAKLSDLQNAAAGSFASAFAALVLCPTELVKCRLQTMYEMETSGKIAKSQNTVWSVIKSILRKDGPLGFYHGLSSTLLREVPGYFFFFGGYELSRSFFASGRSKDELGPVPLMLSGGVGGICLWLAVYPVDCIKSRIQVLSMSGKQAGFIRTFINVVKNEGITALYSGLKPTMIRAFPANGALFLAYEYSRKLMMNQLEAY

SEQ ID NO: 4949 - protein, 678 aa, Homo Sapiens
MAPSLSPGPAALRRAPQLLLLLLAAECALAALLPAREATQFLRPRQRRAFQVFEEAKQGHLERECVEELCSREEAREVFENDPETDYFYPRYLDCINKYGSPYTKNSGFATCVQNLPDQCTPNPCDRKGTQACQDLMGNFFCLCKAGWGGRLCDKDVNECSQENGGCLQICHNKPGSFHCSCHSGFELSSDGRTCQDIDECADSEACGEARCKNLPGSYSCLCDEGFAYSSQEKACRDVDECLQGRCEQVCVNSPGSYTCHCDGRGGLKLSQDMDTCEDILPCVPFSVAKSVKSLYLGRMFSGTPVIRLRFKRLQPTRLVAEFDFRTFDPEGILLFAGGHQDSTWIVLALRAGRLELQLRYNGVGRVTSSGPVINHGMWQTISVEELARNLVIKVNRDAVMKIAVAGDLFQPERGLYHLNLTVGGIPFHEKDLVQPINPRLDGCMRSWNWLNGEDTTIQETVKVNTRMQCFSVTERGSFYPGSGFAFYSLDYMRTPLDVGTESTWEVEVVAHIRPAADTGVLFALWAPDLRAVPLSVALVDYHSTKKLKKQLVVLAVEHTALALMEIKVCDGQEHVVTVSLRDGEATLEVDGTRGQSEVSAAQLQERLAVLERHLRSPVLTFAGGLPDVPVTSAPVTAFYRGCMTLEVNRRLLDLDEAAYKHSDITAHSCPPVEPAAA

SEQ ID NO: 4950 - protein, 435 aa, Homo Sapiens
AWHEGNEACDLDSTVSALALAFYLAKTTEAEEVFVPVLNIKRSELPLRGDIVFFLQKVHIPESILIFRDEIDLHALYQAGQLTLILVDHHILSKSDTALEEAVAEVLDHRPIEPKHCPPCHVSVELVGSCATLVTERILQGAPEILDRQTAALLHGTIILDCVNMDLKIGKATPKDSKYVEKLEALFPDLPKRNDIFDSLQKVKFDVSGLTTEQMLRKDQKTIYRQGVKVAISAIYMDLEAFLQRSNLLADLHAFCQAHSYDVLVAMTIFFNTHNEPVRQLAIFCPHVALQTTICEVLERSHSPPLKLTPASSTHPNLHAYLQGNTQVSRKKLLPLLQEALSAYFDSMKIPSGQPETADVSREQVDKELDRASNSLISGLSQDEEDPPLPPTPMNSLVDECPLDQGLPKLSAEAVFEKCSQISLSQSTTASLSKK

SEQ ID NO: 4951 - protein, 380 aa, Homo Sapiens
MGAAAAQAPLGLPAASARLLLLATSVLLLFAFSLPGSRASNQPPGGGGGTGGDCPGGKGKSINCSELNVRESDVRVCDESSCKYGGVCKEDGDGLKCACQFQCHTNYIPVCGSNGDTYQNECFLRRAACKHQKEITVIARGPCYSDNGSGSGEGEEEGSGAEVHRKHSKCGPCKYKAECDEDAENVGCVCNIDCSGYSFNPVCASDGSSYNNPCFVREASCIKQEQIDIRHLGHCTDTDDTSLLGKKDDGLQYRPDVKDASDQREDVYIGNHMPCPENLNGYCIHGKCEFIYLLRRASCRCESGYTGQHCEKTDFSILYVVPSRQKLTHVLIAAIIGAVQIAIIVAIVMCITRKCPKNNRGRRQKQNLGHFTSDTSSRMV

SEQ ID NO: 4952 - protein, 318 aa, Homo Sapiens
MASPGCLLCVLGLLLCGAASLELSRPHGDTAKKPIIGILMQKCRNKVMKNYGRYYIAASYVKYLESAGARVVPVRLDLTEKDYEILFKSINGILFPGGSVDLRRSDYAKVAKIFYNLSIQSFDDGDYFPVWGTCLGFEELSLLISGECLLTATDTVDVAMPLNFTGGQLHSRMFQNFPTELLLSLAVEPLTANFHKWSLSVKNFTMNEKLKKFFNVLTTNTDGKIEFISTMEGYKYPVYGVQWHPEKAPYEWKNLDGISHAPNAVKTAFYLAEFFVNEARKNNHHFKSESEEEKALIYQFSPIYTGNISSFQQCYIFD

SEQ ID NO: 4953 - protein, 362 aa, Homo Sapiens
MFSSVAHLARANPFNTPHLQLVHDGLGDLRSSSPGPTGQPRRPRNLAAAAVEEQYSCDYGSGRFFILCGLGGIISCGTTHTALVPLDLVKCRMQVDPQKYKGIFNGFSVTLKEDGVRGLAKGWAPTFLGYSMQGLCKFGFYEVFKVLYSNMLGEENTYLWRTSLYLAASASAEFFADIALAPMEAAKVRIQTQPGYANTLRDAAPKMYKEEGLKAFYKGVAPLWMRQIPYTMMKFACFERTVEALYKFVVPKPRSECSKPEQLVVTFVAGYIAGVFCAIVSHPADSVVSVLNKEKGSSASLVLKRLGFKGVWKGLFARIIMIGTLTALQWFIYDSVKVYFRLPRPPPPEMPESLKKKLGLTQ

SEQ ID NO: 4954 - protein, 182 aa, Homo Sapiens
MSGRSVPHAHPATAEYEFANPSRLGEQRFGEGLLPEEILTPTLYHGYYVRPRAAPAGEGSRAGASELRLSEGKFQAFLDVSHFTPDEVTVRTVDNLLEVSARHPQRLDRHGFVSREFCRTYVLPADVDPWRVRAALSHDGILNLEAPRGGRHLDTEVNEVYISLLPAPPDPEEEEEAAIVEP

SEQ ID NO: 4955 - protein, 934 aa, Homo Sapiens [sequence omitted]

SEQ ID NO: 4956 - protein, 849 aa, Homo Sapiens
MTSHYVIAIFALMSFCLATAGPEPGALCELSPVSASHPVQALMESFTVLSGCASRGTTGLPQEVHVLNLALRQGPGQLQREVTLHLNPISSVHIHHKSVVFLLNSPHPLVWHLKTERLATGVSRLFLVSEGSVVQFSSANFSLTAETEERNFPHGNEHLLNWARKEYGAVTSFTELKIARNIYIKVGEDQVFPPKCNIGKNFLSLNYLAEYLQPKAAEGCVMSSQPQNEEVHIIELITPNSNPYSAFQVDITIDIRPSQEDLEVVKNLILILKCKKSVNWVIKSFDVKGSLKIIAPNSIGFGKESERSMTMTKSIRDDIPSTQGNLVKWALDNGYSPITSYTMAPVAIVFHLRLENNEEMGDEEVHTIPPELRILLDPGALPALQNPPIRGGEGQNGGLPFPFPDISRRVWNEEGEDGLPRPKDPVIPSIQLFPGLREPEEVQGSVDIALSVKCDNEKMIVAVEKDSFQASGYSGMDVTLLDPTCKAKMNGTHFVLESPLNGCGTRPRWSALDGVVYYNSIVIQVPALGDSSGWPDGYEDLESGDNGFPGDMDEGDASLFTRPEIVVFNCSLQQVRNPSSFQEQPHGNITFNMELYNTDLFLVPSQGVFSVPENGHVYVEVSVTKAEQELGFAIQTCFISPYSNPDRMSHYTIIENICPKDESVKFYSPKRVHFPIPQADMDKKRFSFVFKPVFNTSLLFLQCELTLCTKMEKHPQKLPKCVPPDEACTSLDASIIWAMMQNKKTFTKPLAVIHHEAESKEKGPSMKEPNPISPPIFHGLDTLTVMGIAFAAFVIGALLTGALWYIYSHTGETAGRQQVPTSPPASENSSAAHSIGSTQSTPCSSSSTA

SEQ ID NO: 4957 - protein, 317 aa, Homo Sapiens
MRLGPRTAALGLLLLCAAAAGAGKAEELHYPLGERRSDYDREALLGVQEDVDEYVKLGHEEQQKRLQAIIKKIDLDSDGFLTESELSSWIQMSFKHYAMQEAKQQFVEYDKNSDDTVTWDEYNIQMYDRVIDFDENTALDDAEEESFRKLHLKDKKRFEKANQDSGPGLSLEEFIAFEHPEEVDYMTEFVIQEALEEHDKNGDGFVSLEEFLGDYRWDPTANEDPEWILVEKDRFVNDYDKDNDGRLDPQELLPWVVPNNQGIAQEEALHLIDEMDLNGDKKLSEEEILENPDLFLTSEATDYGRQLHDDYFYHDEL

SEQ ID NO: 4958 - protein, 336 aa, Homo Sapiens
SGPRSPRSASPGPASTGPRHPQVAEGGGRERAARSREAGEGPASEAAAAAAGAASGSSGENGSAGRQTAAGCHGRHEACEARGRRPRLLNPGRRGGGGGGGQIAARTRRRGGGRMERKGSAAGAKGNPSPPAAGEGQRPPPPLCVPGGGGGAPARGQVGAAAEPAELIRRAHEFKSQGAQCYKDKKFREAIGKYHRALLELKGLLPPPGERERDSRAASPAGALKPGRLSEEQSKTVEAIEIDCYNSLAACLLQAELVNYERVKEYCLKVLKKEGENFKALYRSGVAFYHLGDYDKALYYLKEARTQQPTDTNVIRYIQLTEMKLSRCSQREKEAM

SEQ ID NO: 4959 - protein, 597 aa, Homo Sapiens
MHPPKTPSGALHRKRKMAAWPFSRLWKVSDPILFQMTLIAALLPAVLGNCGPPPTLSFAAPMDITLTETRFKTGTTLKYTCLPGYVRSHSTQTLTCNSDGEWVYNTFCIYKRCRHPGELRNGQVEIKTDLSFGSQIEFSCSEGFFLIGSTTSRCEVQDRGVGWSHPLPQCEIVKCKPPPDIRNGRHSGEENFYAYGFSVTYSCDPRFSLLGHASISCTVENETIGVWRPSPPTCEKITCRKPDVSHGEMVSGFGPIYNYKDTIVFKCQKGFVLRGSSVIHCDADSKWNPSPPACEPNSCINLPDIPHASWETYPRPTKEDVYVVGTVLRYRCHPGYKPTTDEPTTVICQKNLRWTPYQGCEALCCPEPKLNNGEITQHRKSRPANHCVYFYGDEISFSCHETSRFSAICQGDGTWSPRTPSCGDICNFPPKIAHGHYKQSSSYSFFKEEIIYECDKGYILVGQAKLSCSYSHWSAPAPQCKALCRKPELVNGRLSVDKDQYVEPENVTIQCDSGYGVVGPQSITCSGNRTWYPEVPKCEWETPEGCEQVLTGKRLMQCLPNPEDVKMALEVYKLSLEIEQLELQRDSARQSTLDKEL

SEQ ID NO: 4960 - protein, 193 aa, Homo Sapiens
GKARSRGGVEPAGPGGGSPEPYHPTLGIYARCIRNPGVQHFQRDTLCGPYAESFGEIASGFWQATAIFLAVGIFILCMVALVSVFTMCVQSIMKKSIFNVCGLLQGIAGLFLILGLILYPAGWGCQKAIDYCGHYASAYKPGDCSLGWAFYTAIGGTVLTFICAVFSAQAEIATSSDKVQEEIEEGKNLICLL

SEQ ID NO: 4961 - protein, 585 aa, Homo Sapiens
MTPPRLFWVWLLVAGTQGVNDGDMRLADGGATNQGRVEIFYRGQWGTVCDNLWDLTDASVVCRALGFENATQALGRAAFGQGSGPIMLDEVQCTGTEASLADCKSLGWLKSNCRHERDAGVVCTNETRSTHTLDLSRELSEALGQIFDSQRGCDLSISVNVQGEDALGFCGHTVILTANLEAQALWKEPGSNVTMSVDAECVPMVRDLLRYFYSRRIDITLSSVKCFHKLASAYGARQLQGYCASLFAILLPQDPSFQMPLDLYAYAVATGDALLEKLCLQFLAWNFEALTQAEAWPSVPTDLLQLLLPRSDLAVPSELALLKAVDTWSWGERASHEEVEGLVEKIRFPMMLPEELFELQFNLSLYWSHEALFQKKTLQALEFHTVPFQLLARYKGLNLTEDTYKPRIYTSPTWSAFVTDSSWSARKSQLVYQSRRGPLVKYSSDYFQAPSDYRYYPYQSFQTPQHPSFLFQDKRVSWSLVYLPTIQSCWNYGFSCSSDELPVLGLTKSGGSDRTIAYENKALMLCEGLFVADVTDFEGWKAAIPSALDTNSSKSTSSFPCPAGHFNGFRTVIRPFYLTNSSGVD

SEQ ID NO: 4962 - protein, 336 aa, Homo Sapiens
MLQSLAGSSCVRLVERHRSAWCFGFLVLGYLLYLVFGAVVFSSVELPYEDLLRQELRKLKRRFLEEHECLSEQQLEQFLGRVLEASNYGVSVLSNASGNWNWDFTSALFFASTVLSTTGYGHTVPLSDGGKAFCIIYSVIGIPFTLLFLTAVVQRITVHVTRRPVLYFHIRWGFSKQVVAIVHAVLLGFVTVSCFFFIPAAVFSVLEDDWNFLESFYFCFISLSTIGLGDYVPGEGYNQKFRELYKIGITCYLLLGLIAMLVVLETFCELHELKKFRKMFYVKKDKDEDQVHIIEHDQLSFSSITDQAAGMKEDQKQNEPFVATQSSACVDGPANH

SEQ ID NO: 4963 - protein, 244 aa, Homo Sapiens
MKKLMVVLSLIAAAWAEEQNKLVHGGPCDKTSHPYQAALYTSGHLLCGGVLIHPLWVLTAAHCKKPNLQVFLGKHNLRQRESSQEQSSVVRAVIHPDYDAASHDQDIMLLRLARPAKLSELIQPLPLERDCSANTTSCHILGWGKTADGDFPDTIQCAYIHLVSREECEHAYPGQITQNMLCAGDEKYGKDSCQGDSGGPLVCGDHLRGLVSWGNIPCGSKEKPGVYTNVCRYTNWIQKTIQAK

SEQ ID NO: 4964 - protein, 572 aa, Homo Sapiens
MEELEKELDVVDPDGSVPVGLRQRNQTEKQSTGVYNREAMLNFCEKETKKLMQREMSMDESKQVETKTDAKNGQERGRDASKKALGPRRNSDLGKEPKRGGLKKSFSRDRDEAGGKSGEKPKEEKIIRGIDKGRVRAAVDKKEAGKDGRGEERAVATKKEEEKKGGDRNTGLSRDKDKKREEMKEVAKKEDDEKVKGERRNTDTRKEGEKMKRAGGNTDMKKEDEKVKRGTGNTDTKKDDEKVKKNEPLHEKEAKDDSKTKTPEKQTPSGPTKPSEGPAKVEEEAAPSIFDEPLERVKNNDPEMTEVNVNNSDCITNEILVRFTEALEFNTVVKLFALANTRADDHVAFAIAIMLKANKTITSLNLDSNHITGKGILAIFRALLQNNTLTELRFHNQRHICGGKTEMEIAKLLKENTSLLKLGYHFELAGPRMTVTNLLSRNMDKQRQKRLQEQRQAQEAKGEKKDLLEVPKAGAVAKGSPKPSPQPSPKPSPKNSPKKGGAPAAPPPPPPPLAPPLIMENLKNSLSPATQRKMGDKVLPAQEKNSRDQLLAAIRSSNLKQLKKVEVPKLLQ

SEQ ID NO: 4965 - protein, 816 aa, Homo Sapiens
MESRVLLRTFCLIFGLGAVWGLGVDPSLQIDVLTELELGESTTGVRQVPGLHNGTKAFLFQDTPRSIKASTATAEQFFQKLRNKHEFTILVTLKQTHLNSGVILSIHHLDHRYLELESSGHRNEVRLHYRSGSHRPHTEVFPYILADDKWHKLSLAISASHLILHIDCNKIYERVVEKPSTDLPLGTTFWLGQRNNAHGYFKGIMQDVQLLVMPQGFIAQCPDLNRTCPTCNDFHGLVQKIMELQDILAKTSAKLSRAEQRMNRLDQCYCERTCTMKGTTYREFESWIDGCKNCTCLNGTIQCETLICPNPDCPLKSALAYVDGKCCKECKSICQFQGRTYFEGERNTVYSSSGVCVLYECKDQTMKLVESSGCPALDCPESHQITLSHSCCKVCKGYDFCSERHNCMENSICRNLNDRAVCSCRDGFRALREDNAYCEDIDECAEGRHYCRENTMCVNTPGSFMCICKTGYIRIDDYSCTEHDECITNQHNCDENALCFNTVGGHNCVCKPGYTGNGTTCKAFCKDGCRNGGACIAANVCACPQGFTGPSCETDIDECSDGFVQCDSRANCINLPGWYHCECRDGYHDNGMFSPSGESCEDIDECGTGRHSCANDTICFNLDGGYDCRCPHGKNCTGDCIHDGKVKHNGQIWVLENDRCSVCSCQNGFVMCRRMVCDCENPTVDLFCCPECDPRLSSQCLHQNGETLYNSGDTWVQNCQQCRCLQGEVDCWPLPCPDVECEFSILPENECCPRCVTDPCQADTIRNDITKTCLDEMNVVRFTGSSWIKHGTECTLCQCKNGHICCSVDPQCLQEL

SEQ ID NO: 4966 - protein, 2911 aa, Homo Sapiens
MGRRRRLCLQLYFLWLGCVVLWAQGTAGQPQPPPPKPPRPQPPPQQVRSATAGSEGGFLAPEYREEGAAVASRVRRRGQQDVLRGPNVCGSRFHSYCCPGWKTLPGGNQCIVPICRNSCGDGFCSRPNMCTCSSGQISSTCGSKSIQQCSVRCMNGGTCADDHCQCQKGYIGTYCGQPVCENGCQNGGRCIAQPCACVYGFTGPQCERDYRTGPCFTQVNNQMCQGQLTGIVCTKTLCCATTGRAWGHPCEMCPAQPQPCRRGFIPNIRTGACQDVDECQAIPGICQGGNCINTVGSFECRCPAGHKQSETTQKCEDIDECSIIPGICETGECSNTVGSYFCVCPRGYVTSTDGSRCIDQRTGMCFSGLVNGRCAQELPGRMTKMQCCCEPGRCWGIGTIPEACPVRGSEEYRRLCMDGLPMGGIPGSAGSRPGGTGGNGFAPSGNGNGYGPGGTGFIPIPGGNGFSPGVGGAGVGAGGQGPIITGLTILNQTIDICKHHANLCLNGRCIPTVSSYRCECNMGYKQDANGDCIDVDECTSNPCTNGDCVNTPGSYYCKCHAGFQRTPTKQACIDIDECIQNGVLCKNGRCVNSDGSFQCICNAGFELTTDGKNCVDHDECTTTNMCLNGMCINEDGSFKCICKPGFVLAPNGRYCTDVDECQTPGICMNGHCINSEGSFRCDCPPGLAVGMDGRVCVDTHMRSTCYGGIKKGVCVRPFPGAVTKSECCCANPDYGFGEPCQPCPAKNSAEFHGLCSSGVGITVDGRDINECALDPDICANGICENLRGSYRCNCNSGYEPDASGRNCIDIDECLVNRLLCDNGLCRNTPGSYSCTCPPGYVFRTETETCEDINECESNPCVNGACRNNLGSFNCECSPGSKLSSTGLICIDSLKGTCWLNIQDSRCEVNINGATLKSECCATLGAAWGSPCERCELDTACPRGLARIKGVTCEDVNECEVFPGVCPNGRCVNSKGSFHCECPEGLTLDGTGRVCLDIRMEQCYLKWDEDECIHPVPGKFRMDACCCAVGAAWGTECEECPKPGTKEYETLCPRGAGFANRGDVLTGRPFYKDINECKAFPGMCTYGKCRNTIGSFKCRCNSGFALDMEERNCTDIDECRISPDLCGSGICVNTPGSFECECFEGYESGFMMMKNCMDIDGCERNPLLCRGGTCVNTEGSFQCDCPLGHELSPSREDCVDINECSLSDNLCRNGKCVNMIGTYQCSCNPGYQATPDRQGCTDIDECMIMNGGCDTQCTNSEGSYECSCSEGYALMPDGRSCADIDECENNPDICDGGQCTNIPGEYRCLCYDGFMASMDMKTCIDVNECDLNSNICMFGECENTKGSFICHCQLGYSVKKGTTGCTDVDECEIGAHNCDMHASCLNIPGSFKCSCREGWIGNGIKCIDLDECSNGTHQCSINAQCVNTPGSYRCACSEGFTGDGFTCSDVDECAENINLCENGQCLNVPGAYRCECEMGFTPASDSRSCQDIDECSFQNICVSGTCNNLPGMFHCICDDGYELDRTGGNCTDIDECADPINCVNGLCVNTPGRYECNCPPDFQLNPTGVGCVDNRVGNCYLKFGPRGDGSLSCNTEIGVGVSRSSCCCSLGKAWGNPCETCPPVNSTEYYTLCPGGEGFRPNPITIILEDIDECQELPGLCQGGNCINTFGSFQCECPQGYYLSEDTRICEDIDECFAHPGVCGPGTCYNTLGNYTCICPPEYMQVNGGHNCMDMRKSFCYRSYNGTTCENELPFNVTKRMCCCTYNVGKAGNKPCEPCPTPGTADFKTICGNIPGFTFDIHTGKAVDIDECKEIPGICANGVCINQIGSFRCECPTGFSYNDLLLVCEDIDECSNGDNLCQRNADCINSPGSYRCECAAGFKLSPNGACVDRNECLEIPNVCSHGLCVDLQGSYQCICHNGFKASQDQTMCMDVDECERHPCGNGTCKNTVGSYNCLCYPGFELTHNNDCLDIDECSSFFGQVCRNGRCFNEIGSFKCLCNEGYELTPDGKNCIDTNECVALPGSCSPGTCQNLEGSFRCICPPGYEVKSENCIDINECDEDPNICLFGSCTNTPGGFQCLCPPGFVLSDNGRRCFDTRQSFCFTNFENGKCSVPKAFNTTKAKCCCSKMPGEGWGDPCELCPKDDEVAFQDLCPYGHGTVPSLHDTREDVNECLESPGICSNGQCINTDGSFRCECPMGYNLDYTGVRCVDTDECSIGNPCGNGTCTNVIGSFECNCNEGFEPGPMMNCEDINECAQNPLLCALRCMNTFGSYECTCPIGYALREDQKMCKDLDECAEGLHDCESRGMMCKNLIGTFMCICPPGMARRPDGEGCVDENECRTKPGICENGRCVNIIGSYRCECNEGFQSSSSGTECLDNRQGLCFAEVLQTICQMASSSRNLVTKSECCCDGGRGWGHQCELCPLPGTAQYKKICPHGPGYTTDGRDIDECKVMPNLCTNGQCINTMGSFRCFCKVGYTTDISGTSCIDLDECSQSPKPCNYICKNTEGSYQCSCPRGYVLQEDGKTCKDLDECQTKQHNCQFLCVNTLGGFTCKCPPGFTQHHTACIDNNECGSQPLLCGGKGICQNTPGSFSCECQRGFSLDATGLNCEDVDECDGNHRCQHGCQNILGGYRCGCPQGYIQHYQWNQCVDENECSNPNACGSASCYNTLGSYKCACPSGFSFDQFSSACHDVNECSSSKNPCNYGCSNTEGGYLCGCPPGYYRVGQGHCVSGMGFNKGQYLSLDTEVDEENALSPEACYECKINGYPKKDSRQKRSIHEPDPTAVEQISLESVDMDSPVNMKFNLSHLGSKEHILELRPAIQPLNNHIRYVISQGNDDSVFRIHQRNGLSYLHTAKKKLMPGTYTLEITSIPLYKKKELKKLEESNEDDYLLGELGEALRMRLQIQLY

SEQ ID NO: 4967 - protein, 308 aa, Homo Sapiens [sequence omitted]

SEQ ID NO: 4968 - protein, 559 aa, Homo Sapiens [sequence omitted]

SEQ ID NO: 4969 - protein, 515 aa, Homo Sapiens
MAEQVALSRTQVCGILREELFQGDAFHQSDTHIFIIMGASGDLAKKKIYPTIWWLFRDGLLPENTFIVGYARSRLTVADIRKQSEPFFKATPEEKLKLEDFFARNSYVAGQYDDAASYQRLNSHMDALHLGSQANRLFYLALPPTVYEAVTKNIHESCMSQIGWNRIIVEKPFGRDLQSSDRLSNHISSLFREDQIYRIDHYLGKEMVQNLMVLRFANRIFGPIWNRDNIACVILTFKEPFGTEGRGGYFDEFGIIRDVMQNHLLQMLCLVAMEKPASTNSDDVRDEKVKVLKCISEVQANNVVLGQYVGNPDGEGEATKGYLDDPTVPRGSTTATFAAVVLYVENERWDGVPFILRCGKALNERKAEVRLQFHDVAGDIFHQQCKRNELVIRVQPNEAVYTKMMTKKPGMFFNPEESELDLTYGNRYKNVKLPDAYERLILDVFCGSQMHFVRSDELREAWRIFTPLLHQIELEKPKPIPYIYGSRGPTEADELMKRVGFQYEGTYKWVNPHKL

SEQ ID NO: 4970 - protein, 244 aa, Homo Sapiens
MLLLGAVLLLLALPGHDQETTTQGPGVLLPLPKGACTGWMAGIPGHPGHNGAPGRDGRDGTPGEKGEKGDPGLIGPKGDIGETGVPGAEGPRGFPGIQGRKGEPGEGAYVYRSAFSVGLETYVTIPNMPIRFTKIFYNQQNHYDGSTGKFHCNIPGLYYFAYHITVYMKDVKVSLFKKDKAMLFTYDQYQENNVDQASGSVLLHLEVGDQVWLQVYGEGERNGLYADNDNDSTFTGFLLYHDTN

SEQ ID NO: 4971 - protein, 824 aa, Homo Sapiens
MADRAEMFSLSTFHSLSPPGCRPPQDISLEEFDDEDLSEITDDCGLGLSYDSDHCEKDSLSLGRSEQPHPICSFQDDFQEFEMIDDNEEEDDEDEEEEEEEEEGDGEGQEGGDPGSEAPAPGPLIPSPSVEEPHKHRPTTLRLTTLGAQDSLNNNGGFDLVRPASWQETALCSPAPEALRELPGPLPATDTGPGGAQSPVRPGCDCEGNRPAEPPAPGGTSPSSDPGIEADLRSRSSGGRGGRRSSQELSSPGSDSEDAGGARLGRMISSISETELELSSDGGSSSSGRSSHLTNSIEEASSPASEPEPPREPPRRPAFLPVGPDDTNSEYESGSESEPDLSEDADSPWLLSNLVSRMISEGSSPIRCPGQCLSPAPRPPGEPVSPAGGAAQDSQDPEAAAGPGGVELVDMETLCAPPPPAPAAPRPGPAQPGPCLFLSNPTRDTITPLWAAPGRAARPGRACSAACSEEEDEEDDEEEEDAEDSAGSPGGRGTGPSAPRDASLVYDAVKYTLVVDEHTQLELVSLRRCAGLGHDSEEDSGGEASEEEAGAALLGGGQVSGDTSPDSPDLTFSKKFLNVFVNSTSRSSSTESFGLFSCLVNGEEREQTHRAVFRFIPRHPDELELDVDDPVLVEAEEDDFWFRGFNMRTGERGVFPAFYAHAVPGPAKDLLGSKRSPCWVERFDVQFLGSVEVPCHQGNGILCAAMQKIATARKLTVHLRPPASCDLEISLRGVKLSLSGGGPEFQRCSHFFQMKNISFCGCHPRNSCYFGFITKHPLLSRFACHVFVSQESMRPVAQSVGRAFLEYYQEHLAYACPTEDIYLE

SEQ ID NO: 4972 - protein, 201 aa, Homo Sapiens
MDLSLLWVLLPLVTMAWGQYGDYGYPYQQYHDYSDDGWVNLNRQGFSYQCPQGQVIVAVRSIFSKKEGSDRQWNYACMPTPQSLGEPTECWWEEINRAGMEWYQTCSNNGLVAGFQSRYFESVLDREWQFYCCRYSKRCPYSCWLTTEYPGHYGEEMDMISYNYDYYIRGATTTFSAVERDRQWKFIMCRMTEYDCEFANV

SEQ ID NO: 4973 - protein, 2 aa, Homo Sapiens
MS

SEQ ID NO: 4974 - protein, 247 aa, Homo Sapiens
MQPILLLLAFLLLPRADAGEIIGGHEAKPHSRPYMAYLMIWDQKSLKRCGGFLIQDDFVLTAAHCWGSSINVTLGAHNIKEQEPTQQFIPVKRPIPHPAYNPKNFSNDIMLLQLERKAKRTRAVQPLRLPSNKAQVKPGQTCSVAGWGQTAPLGKHSHTLQEVKMTVQEDRKCESDLRHYYDSTIELCVGDPEIKKTSFKGDSGGPLVCNKVAQGIVSYGRNNGMPPRACTKVSSFVHWIKKTMKRY

SEQ ID NO: 4975 - protein, 643 aa, Homo Sapiens [sequence omitted]

SEQ ID NO: 4976 - protein, 512 aa, Homo Sapiens
MGCIKSKGKDSLSDDGVDLKTQPVRNTERTIYVRDPTSNKQQRPVPESQLLPGQRFQTKDPEEQGDIVVALYPYDGIHPDDLSFKKGEKMKVLEEHGEWWKAKSLLTKKEGFIPSNYVAKLNTLETEEWFFKDITRKDAERQLLAPGNSAGAFLIRESETLKGSFSLSVRDFDPVHGDVIKHYKIRSLDNGGYYISPRITFPCISDMIKHYQKQADGLCRRLEKACISPKPQKPWDKDAWEIPRESIKLVKRLGAGQFGEVWMGYYNNSTKVAVKTLKPGTMSVQAFLEEANLMKTLQHDKLVRLYAVVTREEPIYIITEYMAKGSLLDFLKSDEGGKVLLPKLIDFSAQIAEGMAYIERKNYIHRDLRAANVLVSESLMCKIADFGLARVIEDNEYTAREGAKFPIKWTAPEAINFGCFTIKSDVWSFGILLYEIVTYGKIPYPGRTNADVMTALSQGYRMPRVENCPDELYDIMKMCWKEKAEERPTFDYLQSVLDDFYTATEGQYQQQP

SEQ ID NO: 4977 - protein, 1338 aa, Homo Sapiens
MDRASELLFYVNGRKVIEKNVDPETMLLPYLRKKLRLTGTPYGCGGGGCGACTVMISRYNPITKRIRHHPANACLIPICSLYGAAVTTVEGIGSTHTRIHPVQERIAKCHGTQCGFCTPGMVMSIYPLLRNHPEPTLDQLTDALGGNLCRCHGYRPIIDACKTFCKTSGCCQSKENGVCCLDQGINGLPEFEEGSKTSPKLFAEEEFLPLDPTQELIFPPELMIMADKQSQRTRVFGSERMMWFSPVTLKELLEFKFKYPQAPVIMGNTSVGPEVKFKGVFHPGYNSPDRIEEPECCKPCIYGLTLGAGLSLAQVKDILADVVQKLPEEKTQMYHALLKHLGTLAGSQIRNMASLGGHIISRHPDSDLNPILAVGNCTLNLLSKEGKRQIPLNEQFLSKCPNADLKPQEILVSVNIPISRKWEFVSAFRQAQRQENALAIVNSGMRVFFGEGDGIIRELCISYGGVGPATICAKNSCQKLIGRHWNEQMLDIACRLILNELSLLGSAPGGKVEFKRTLIISFLFKFYLEVSQILKKMDPVHYPSLADKYESALEDLHSKHHCSTLKYQNIGPKQHPEDPIGHPIMHLSGVKHATGEAIYCDDMPLVDQELFLTFVTSSRAHAKIVSNDLSEALSMPGVVDIMTAEHLSDVNSFCFFTEAEKFLATDKVFCVGQLVCAVLADSEVQAKRAAKRVKIVYQDLEPLILTIEESIQHNSSFKPERKLEYGNVDEAFKVVDQILEGEIHMGGQEHFYMETQSMLVVPKGEDQEMDVYVSTQFPKYIQDIVASTLKLPANKVMCHVRRVGGAFGGKVLKTGIIAAVTAFAANKHGRAVRCVLERGEDMLITGGRHPYLGKYKAGFMNDGRILALDMEHYSNAGASLDESLFVIEMGLLKMDNAYKFPNLRCRGWACRTNLPSNTAFRGFGFPQAVLITESCITEVAAKCGLSPEKVRIINMYKEIDQTPYKQEINAKNLIQCWRECMAMSSYSLRKVAVEKFNAENYWKKKGLAMVPLKFPVGLASRAAGQAAALVHIYLDGSVLVTHGGIEMGQGVHTKMIQVVSRELRMPMSNVHLRGTSTETVPNANISGGSVVADLNGLAVKDACQTLLKRLEPIISKNPKGTWKDWAQTAFDESINLSAVGYFRGYESDMNWEKGEGQPFEYFVYGAACSEVEIDCLTGDHKNIRTDIVMDVGCSINPAIDIGQIEGAFIQGMGLYTIEELNYSPQGILHTRGPDQYKIPAICDMPTELHIALLPPSQNSNTLYSSKGLGESGVFLGCSVFFAIHDAVSAARQERGLHGPLTLNSPLTPEKIRMACEDKFTKMIPRDEPGSYVPWNVPI

SEQ ID NO: 4978 - protein, 556 aa, Homo Sapiens
MPSFDEALQRVGEFGRFQRRVFLLLCLTGVTFAFLFVGVVFLGTQPDHYWCRGPSAAALAERCGWSPEEEWNRTAPASRGPEPPERRGRCQRYLLEAANDSASATSALSCADPLAAFPNRSAPLVPCRGGWRYAQAHSTIVSEFDLVCVNAWMLDLTQAILNLGFLTGAFTLGYAADRYGRIVIYLLSCLGVGVTGVVVAFAPNFPVFVIFRFLQGVFGKGTWMTCYVIVTEIVGSKQRRIVGIVIQMFFTLGIIILPGIAYFIPNWQGIQLAITLPSFLFLLYYWVVPESPRWLITRKKGDKALQILRRIAKCNGKYLSSNYSEITVTDEEVSNPSFLDLVRTPQMRKCTLILMFAWFTSAVVYQGLVMRLGIIGGNLYIDFFISGVVELPGALLILLTIERLGRRLPFAASNIVAGVACLVTAFLPEGIAWLRTTVATLGRLGITMAFEIVYLVNSELYPTTLRNFGVSLCSGLCDFGGIIAPFLLFRLAAVWLELPLIIFGILASICGGLVMLLPETKGIALPETVDDVEKLGSPHSCKCGRNKKTPVSRSHL

SEQ ID NO: 4979 - protein, 101 aa, Homo Sapiens
MSDQEAKPSTEDLGDKKEGEYIKLKVIGQDSSEIHFKVKMTTHLKKLKESYCQRQGVPMNSLRFLFEGQRIADNHTPKELGMEEEDVIEVYQEQTGGHSTV

SEQ ID NO: 4980 - protein, 320 aa, Homo Sapiens
MEEVPHDCPGADSAQAGRGASCQGCPNQRLCASGAGATPDTAIEEIKEKMKTVKHKILVLSGKGGVGKSTFSAHLAHGLAEDENTQIALLDIDICGPSIPKIMGLEGEQVHQSGSGWSPVYVEDNLGVMSVGFLLSSPDDAVIWRGPKKNGMIKQFLRDVDWGEVDYLIVDTPPGTSDEHLSVVRYLATAHIDGAVIITTPQELSLQDVRKEINFCRKVKLPIIGVVENMSPFICPKCKKESQIFPPTTGGAELMCQDLEVPLLGRVPLDPLIGKNCDKGQSFFIDAPDSPATLAYRSIIQRIQEFCNLHQSKEENLISS

SEQ ID NO: 4981 - protein, 442 aa, Homo Sapiens
MQPPPSLCGRALVALVLACGLSRIWGEERGFPPDRATPLLQTAEIMTPPTKTLWPKGSNASLARSLAPAEVPKGDRTAGSPPRTISPPPCQGPIEIKETFKYINTVVSCLVFVLGIIGNSTLLRIIYKNKCMRNGPNILIASLALGDLLHIVIDIPINVYKLLAEDWPFGAEMCKLVPFIQKASVGITVLSLCALSIDRYRAVASWSRIKGIGVPKWTAVEIVLIWVVSVVLAVPEAIGFDIITMDYKGSYLRICLLHPVQKTAFMQFYKTAKDWWLFSFYFCLPLAITAFFYTLMTCEMLRKKSGMQIALNDHLKQRREVAKTVFCLVLVFALCWLPLHLSRILKLTLYNQNDPNRCELLSFLLVLDYIGINMASLNSCINPIALYLVSKRFKNCFKSCLCCWCQSFEEKQSLEEKQSCLKFKANDHGYDNFRSSNKYSSS

SEQ ID NO: 4982 - protein, 567 aa, Homo Sapiens
MGRGLLRGLWPLHIVLWTRIASTIPPHVQKSVNNDMIVTDNNGAVKFPQLCKFCDVRFSTCDNQKSCMSNCSITSICEKPQEVCVAVWRKNDENITLETVCHDPKLPYHDFILEDAASPKCIMKEKKKPGETFFMCSCSSDECNDNIIFSEEYNTSNPDLLLVIFQVTGISLLPPLGVAISVIIIFYCYRVNRQQKLSSTWETGKTRKLMEFSEHCAIILEDDRSDISSTCANNINHNTELLPIELDTLVGKGRFAEVYKAKLKQNTSEQFETVAVKIFPYEEYASWKTEKDIFSDINLKHENILQFLTAEERKTELGKQYWLITAFHAKGNLQEYLTRHVISWEDLRKLGSSLARGIAHLHSDHTPCGRPKMPIVHRDLNSSNILVKNDLTCCLCDFGLSLRLDPTLSVDDLANSGQVGTARYMAPEVLESRMNLENAESFKQTDVYSMALVLWEMTSRCNAVGEVKDYEPPFGSKVREHPCVESMKDNVLRDRGRPEIPSFWLNHQGIQMVCETLTECWDHDPEARLTAQCVAERFSELEHLDRLSGRSCSEEKIPEDGSLNTTK

SEQ ID NO: 4983 - protein, 650 aa, Homo Sapiens
MMGIGKNTTSKSMEAGSSTEGKYEDEAKHPAFFTLPVVINGGATSSGEQDNEDTELMAIYTTENGIAEKSSLAETLDSTGSLDPQRSDMIYTIEDVPPWYLCIFLGLQHYLTCFSGTIAVPFLLADAMCVGYDQWATSQLIGTIFFCVGITTLLQTTFGCRLPLFQASAFAFLAPARAILSLDKWKCNTTDVSVANGTAELLHTEHIWYPRIREIQGAIIMSSLIEVVIGLLGLPGALLKYIGPLTITPTVALIGLSGFQAAGERAGKHWGIAMLTIFLVLLFSQYARNVKFPLPIYKSKKGWTAYKLQLFKMFPIILAILVSWLLCFIFTVTDVFPPDSTKYGFYARTDARQGVLLVAPWFKVPYPFQWGLPTVSAAGVIGMLSAVVASIIESIGDYYACARLSCAPPPPIHAINRGIFVEGLSCVLDGIFGTGNGSTSSSPNIGVLGITKVGSRRVIQCGAALMLALGMIGKFSALFASLPDPVLGALFCTLFGMITAVGLSNLQFIDLNSSRNLFVLGFSIFFGLVLPSYLRQNPLVTGITGIDQVLNVLLTTAMFVGGCVAFILDNTIPGTPEERGIRKWKKGVGKGNKSLDGMESYNLPFGMNIIKKYRCFSYLPISPTFVGYTWKGLRKSDNSRSSDEDSQATG

SEQ ID NO: 4984 - protein, 530 aa, Homo Sapiens
MTRDFKPGDLIFAKMKGYPHWPARVDEVPDGAVKPPTNKLPIFFFGTHETAFLGPKDIFPYSENKEKYGKPNKRKGFNEGLWEIDNNPKVKFSSQQAATKQSNASSDVEVEEKETSVSKEDTDHEEKASNEDVTKAVDITTPKAARRGRKRKAEKQVETEEAGVVTTATASVNLKVSPKRGRPAATEVKIPKPRGRPKMVKQPCPSESDIITEEDKSKKKGQEEKQPKKQPKKDEEGQKEEDKPRKEPDKKEGKKEVESKRKNLAKTGVTSTSDSEEEGDDQEGEKKRKGGRNFQTAHRRNMLKGQHEKEAADRKRKQEEQMETEQQNKDEGKKPEVKKVEKKRETSMDSRLQRIHAEIKNSLKIDNLDVNRCIEALDELASLQVTMQQAQKHTEMITTLKKIRRFKVSQVIMEKSTMLYNKFKNMFLVGEGDSVITQVLNKSLAEQRQHEEANKTKDQGKKGPNKKLEKEQTGSKTLNGGSDAQDGNQPQHNGESNEDSKDNHEASTKKKPSSEERETEISLKDSTLDN

SEQ ID NO: 4985 - protein, 450 aa, Homo Sapiens
MNLEGGGRGGEFGMSAVSCGNGKLRQWLIDQIDSGKYPGLVWENEEKSIFRIPWKHAGKQDYNREEDAALFKAWALFKGKFREGIDKPDPPTWKTRLRCALNKSNDFEELVERSQLDISDPYKVYRIVPEGAKKGAKQLTLEDPQMSMSHPYTMTTPYPSLPAQVHNYMMPPLDRSWRDYVPDQPHPEIPYQCPMTFGPRGHHWQGPACENGCQVTGTFYACAPPESQAPGVPTEPSIRSAEALAFSDCRLHICLYYREILVKELTTSSPEGCRISHGHTYDASNLDQVLFPYPEDNGQRKNIEKLLSHLERGVVLWMAPDGLYAKRLCQSRIYWDGPLALCNDRPNKLERDQTCKLFDTQQFLSELQAFAHHGRSLPRFQVTLCFGEEFPDPQRQRKLITAHVEPLLARQLYYFAQQNSGHFLRGYDLPEHISNPEDYHRSIRHSSIQE

SEQ ID NO: 4986 - protein, 550 aa, Homo Sapiens
MPPPRTGRGLLWLGLVLSSVCVALGSETQANSTTDALNVLLIIVDDLRPSLGCYGDKLVRSPNIDQLASHSLLFQNAFAQQAVCAPSRVSFLTGRRPDTTRLYDFNSYWRVHAGNFSTIPQYFKENGYVTMSVGKVFHPGISSNHTDDSPYSWSFPPYHPSSEKYENTKTCRGPDGELHANLLCPVDVLDVPEGTLPDKQSTEQAIQLLEKMKTSASPFFLAVGYHKPHIPFRYPKEFQKLYPLENITLAPDPEVPDGLPPVAYNPWMDIRQREDVQALNISVPYGPIPVDFQRKIRQSYFASVSYLDTQVGRLLSALDDLQLANSTIIAFTSDHGWALGEHGEWAKYSNFDVATHVPLIFYVPGRTASLPEAGEKLFPYLDPFDSASQLMEPGRQSMDLVELVSLFPTLAGLAGLQVPPRCPVPSFHVELCREGKNLLKHFRFRDLEEDPYLPGNPRELIAYSQYPRPSDIPQWNSDKPSLKDIKIMGYSIRTIDYRYTVWVGFNPDEFLANFSDIHAGELYFVDSDPLQDHNMYNDSQGGDLFQLLMP

SEQ ID NO: 4987 - protein, 448 aa, Homo Sapiens
SETYCMFQDKKYRVGERWHPYLEPYGLVYCVNCICSENGNVLCSRVRCPNVHCLSPVHIPHLCCPRCPEDSLPPVNNKVTSKSCEYNGTTYQHGELFVAEGLFQNRQPNQCTQCSCSVLSEAFTLILDASNLNSVSPWQEGNVYCGLKTCPKLTCAFPVSVPDSCCRVCRGDGELSWEHSDGDIFRQPANREARHSYHRSHYDPPPSRQAGGLSRFPGARSHRGALMDSQQASGTIVQIVINNKHKHGQVCVSNGKTYSHGESWHPNLRAFGIVECVLCTCNVTKQECKKIHCPNRYPCKYPQKIDGKCCKVCPGKKAKEELPGQSFDNKGYFCGEETMPVYESVFMEDGETTRKIALETERPPQVEVHVWTIRKGILQHFHIEKISKRMFEELPHFKLVTRTTLSQWKIFTEGEAQISQMCSSRVCRTELEDLVKVLYLERSEKGHC

SEQ ID NO: 4988 - protein, 588 aa, Homo Sapiens [sequence omitted]

SEQ ID NO: 4989 - protein, 1109 aa, Homo Sapiens
MGSKGVYQYHWQSHNVKHSGVDDMVLLSKITENSIVENLKKRYMDDYIFTYIGSVLISVNPFKQMPYFGEKEIEMYQGAAQYENPPHIYALADNMYRNMIIDRENQCVIISGESGAGKTVAAKYIMSYISRVSGGGTKVQHVKDIILQSNPLLEAFGNAKTVRNNNSSRFGKYFEIQFSPGGEPDGGKISNFLLEKSRVVMRNPGERSFHIFYQLIEGASAEQKHSLGITSMDYYYYLSLSGSYKVDDIDDRREFQETLHAMNVIGIFAEEQTLVLQIVAGILHLGNISFKEVGNYAAVESEEFLAFPAYLLGINQDRLKEKLTSRQMDSKWGGKSESIHVTLNVEQACYTRDALAKALHARVFDFLVDSINKAMEKDHEEYNIGVLDIYGFEIFQKNGFEQFCINFVNEKLQQIFIELTLKAEQEEYVQEGIRWTPIEYFNNKIVCDLIENKVNPPGIMSILDDVCATMHAVGEGADQTLLQKLQMQIGSHEHFNSWNQGFIIHHYAGKVSYDMDGFCERNRDVLFMDLIELMQSSELPFIKSLFPENLQADKKGRPTTAGSKIKKQANDLVSTLMKCTPHYIRCIKPNETKKPRDWEESRVKHQVEYLGLKENIRVRRAGYAYRRIFQKFLQRYAILTKATWPSWQGEEKQGVLHLLQSVNMDSDQFQLGRSKVFIKAPESLFLLEEMRERKYDGYARVIQKSWRKFVARKKYVQMREEASDLLLNKKERRRNSINRNFIGDYIGMEEHPELQQFVGKREKIDFADTVTKYDRRFKGVKRDLLLTPKCLYLIGREKVKQGPDKGLVKEVLKRKIEIERILSVSLSTMQDDIFILHEQEYDSLLESVFKTEFLSLLAKRYEEKTQKQLPLKFSNTLELKLKKENWGPGVQGAGSRQVQFHQGFGDLAVLKPSNKVLQVSIGPGLPKNSRPTRRNTTQNTGYSSGTQNANYPVRAAPPPPGYHQNGVIRNQYVPYPHAPGSQRSIQKSLYTSMARPPLPRQQSTSSDRVSQTPESLDFLKVPDQGAAGVRRQTTSRPPPAGGRPKPQPKPKPQVPQCKALYAYDAQDTDELSFNANDIIDIIKEDPSGWWTGRLRGKPGLFPNNYVTKI

SEQ ID NO: 4990 - protein, 162 aa, Homo Sapiens
MDIPQTKQDLELPKLAGTWHSMAMATNNISLMATLKAPLRVHITSLLPTPEDNLEIVLHRWENNSCVEKKVLGEKTGNPKKFKINYTVANEATLLDTDYDNFLFLCLQDTTTPIQSMMCQYLARVLVEDDEIMQGFIRAFRPLPRHLWYLLDLKQMEEPCRF

SEQ ID NO: 4991 - protein, 823 aa, Homo Sapiens
MKRHRPVSSSDSSDESPSTSFTSGSMYRIKSKIPNEHKKPAEVFRKDLISAMKLPDSHHINPDSYYLFADTWKEEWEKGVQVPASPDTVPQPSLRIIAEKVKDVLFIRPRKYIHCSSPDTTEPGYINIMELAASVCRYDLDDMDIFWLQELNEDLAEMGCGPVDENLMEKTVEVLERHCHENMNHAIETEEGLGIEYDEDVICDVCRSPDSEEGNDMVFCDKCNVCVHQACYGILKVPEGSWLCRSCVLGIYPQCVLCPKKGGALKTTKTGTKWAHVSCALWIPEVSIACPERMEPITKISHIPPSRWALVCNLCKLKTGACIQCSIKSCITAFHVTCAFEHGLEMKTILDEGDEVKFKSYCLKHSQNRQKLGEAEYPHHRAKEQSQAKSEKTSLRAQKLRELEEEFYSLVRVEDVAAELGMPTLAVDFIYNYWKLKRKSNFNKPLFPPKEDEENGLVQPKEESIHTRMRMFMHLRQDLERVRNLCYMISRREKLKLSHNKIQEQIFGLQVQLLNQEIDAGLPLTNALENSLFYPPPRITLKLKMPKSTPEDHRNSSTETDQQPHSPDSSSSVHSIRNMQVPQESLEMRTKSYPRYPLESKNNRLLASLSHSRSEAKESSPAWRTPSSECYHGQSLGKPLVLQAALHGQSSIGNGKSQPNSKFAKSNGLEGSWSGNVTQKDSSSEMFCDQEPVFSPHLVSQGSFRKSTVEHFSRSFKETTNRWVKNTEDLQCYVKPTKNMSPKEQFWGRQVLRRSAGRAPYQENDGYCPDLELSDSEAESDGNKEKVRVRKDSSDRENPPHDSRRDCHGKSKTHPLSHSSMQR

SEQ ID NO: 4992 - protein, 419 aa, Homo Sapiens
EISIMAASISGYTFSAVCFHSANSNADHEGFLLGEVRQEETFSISDSQISNTEFLQVIQIYNHQPCSKLFSFYDYASKVNEESLDRILKDRRKKVIGWYRFRRNTQQQMSYREQVLHKQLTRILGVPDLVFLLFSFISTANNSTHALEYVLFRPNRRYNQRISLAIPNLGNTSQQEYKVSSVPNTSQSYAKVIKEHGTDFFDKDGVMKDIRAIYQVYNALQEKVQAVCADVEKSERVVESCQAEVNKLRRQITQRKNEKEQERRLQQAVLSRQMPSESLDPAFSPRMPSSGFAAEGRSTLGDAEASDPPPPYSDFHPNNQESTLSHSRMERSVFMPRPQAVGSSNYASTSAGLKYPGSGADLPPPQRAAGDSGEDSDDSDYENLIDPTEPSNSEYSHSKDSRPMAHPDEDPRNTQTSQI

SEQ ID NO: 4993 - protein, 491 aa, Homo Sapiens
RRFPPAGAVAVIERGVRGGSQRCRTMADQLYLENIDEFVTDQNKIVTYKWLSYTLGVHVNQAKQMLYDYVERKRKENSGAQLHVTYLVSGSLIQNGHSCHKVAVVREDKLEAVKSKLAVTASIHVYSIQKAMLKDSGPLFNTDYDILKSNLQNCSKFSAIQCAAAVPRAPAESSSSSKKFEQSHLHMSSETQANNELTTNGHGPPASKQVSQQPKGIMGMFASKAAAKTQETNKETKTEAKEVTNASAAGNKAPGKGNMMSNFFGKAAMNKFKVNLDSEQAVKEEKIVEQPTVSVTEPKLATPAGLKKSSKKAEPVKVLQKEKKRGKRVALSDDETKETENMRKKRRRIKLPESDSSEDEVFPDSPGAYEAESPSPPPPPSPPLEPVPKTEPEPPSVKSSSGENKRKRKRVLKSKTYLDGEGCIVTEKVYESESCTDSEEELNMKTSSVHRPPAMTVKKEPREERKGPKKGTAALGKANRQVSITGFFQRK

SEQ ID NO: 4994 - protein, 249 aa, Homo Sapiens [sequence omitted]

SEQ ID NO: 4995 - protein, 508 aa, Homo Sapiens
MPPKRNEKYKLPIPFPEGKVLDDMEGNQWVLGKKIGSGGFGLIYLAFPTNKPEKDARHVVKVEYQENGPLFSELKFYQRVAKKDCIKKWIERKQLDYLGIPLFYGSGLTEFKGRSYRFMVMERLGIDLQKISGQNGTFKKSTVLQLGIRMLDVLEYIHENEYVHGDVKAANLLLGYKNPDQVYLADYGLSYRYCPNGNHKQYQENPRKGHNGTIEFTSLDAHKGVALSRRSDVEILGYCMLRWLCGKLPWEQNLKDPVAVQTAKTNLLDELPQSVLKWAPSGSSCCEIAQFLVCAHSLAYDEKPNYQALKKILNPHGIPLGPLDFSTKGQSINVHTPNSQKVDSQKAATKQVNKAHNRLIEKKVHSERSAESCATWKVQKEEKLIGLMNNEAAQESTRRRQKYQESQEPLNEVNSFPQKISYTQFPNSFYEPHQDFTSPDIFKKSRSPSWYKYTSTVSTGITDLESSTGLWPTISQFTLSEETNADVYYYRIIIPVLLMLVFLALFFL

SEQ ID NO: 4996 - protein, 313 aa, Homo Sapiens
MPVAGSELPRRPLPPAAQERDAEPRPPHGELQYLGQIQHILRCGVRKDDRTGTGTLSVFGMQARYSLRDEFPLLTTKRVFWKGVLEELLWFIKGSTNAKELSSKGVKIWDANGSRDFLDSLGFSTREEGDLGPVYGFQWRHFGAEYRDMESDYSGQGVDQLQRVIDTIKTNPDDRRIIMCAWNPRDLPLMALPPCHALCQFYVVNSELSCQLYQRSGDMGLGVPFNIASYALLTYMIAHITGLKPGDFIHTLGDAHIYLNHIEPLKIQLQREPRPFPKLRILRKVEKIDDFKAEDFQIEGYNPHPTIKMEMAV

SEQ ID NO: 4997 - protein, 385 aa, Homo Sapiens
MKDEPRSTNLFMKLDSVFIWKEPFGLVLIIAPWNYPLNLTLVLLVGTLPAGNCVVLKPSEISQGTEKVLAEVLPQYLDQSCFAVVLGGPQETGQLLEHKLDYIFFTGSPRVGKIVMTAATKHLTPVTLELGGKNPCYVDDNCDPQTVANRVAWFCYFNAGQTCVAPDYVLCSPEMQERLLPALQSTITRFYGDDPQSSPNLGRIINQKQFQRLRALLGCGRVAIGGQSNESDRYIAPTVLVDVQETEPVMQEEIFGPILPIVNVQSVDEAIKFINRQEKPLALYAFSNSRQVVNQMLERTSSGSFGGNEGFTYISLLSVPFGGVGHSGMGRYHGKFTFDTFSHHRTCLLAPSGLEKLKEIRYPPYTDWNQQLLRWGMGSQSCTLL

SEQ ID NO: 4998 - protein, 469 aa, Homo Sapiens [sequence omitted]

SEQ ID NO: 4999 - protein, 640 aa, Homo Sapiens
MGQPSLTWMLMVVVASWFITTAATDTSEARWCSECHSNATCTEDEAVTTCTCQEGFTGDGLTCVDLDECAIPGAHNCSANSSCVNTPGSFSCVCPEGFRLSPGLGCTDVDECAEPGLSHCHALATCVNVVGSYLCVCPAGYRGDGWHCECSPGSCGPGLDCVPEGDALVCADPCQAHRTLDEYWRSTEYGEGYACDTDLRGWYRFVGQGGARMAETCVPVLRCNTAAPMWLNGTHPSSDEGIVSRKACAHWSGHCCLWDASVQVKACAGGYYVYNLTAPPECHLAYCTDPSSVEGTCEECSIDEDCKSNNGRWHCQCKQDFNITDISLLEHRLECGANDMKVSLGKCQLKSLGFDKVFMYLSDSRCSGFNDRDNRDWVSVVTPARDGPCGTVLTRNETHATYSNTLYLADEIIIRDLNIKINFACSYPLDMKVSLKTALQPMVSALNIRVGGTGMFTVRMALFQTPSYTQPYQGSSVTLSTEAFLYVGTMLDGGDLSRFALLMTNCYATPSSNATDPLKYFIIQDRCPHTRDSTIQVVENGESSQGRFSVQMFRFAGNYDLVYLHCEVYLCDTMNEKCKPTCSGTRFRSGSVIDQSRVLNLGPITRKGVQATVSRAFSSLGLLKVWLPLLLSATLTLTFQ

SEQ ID NO: 5000 - protein, 1214 aa, Homo Sapiens
AAAGEGWGAPTQSEPRRGRLRLTQRFPRAASAHPRPHQPPPGGCTRAGEEGATVRVGGAGWVPEVTSSAVEAGAAEAELRSCWVHRPLPSAREVTNVKDVAEVFQKWLKIEGKKCHCLSEKTKQNMGNTTTKFRKALINGDENLACQIYENNPQLKESLDPNTSYGEPYQHNTPLHYAARHGMNKILGTFLGRDGNPNKRNVHNETSMHLLCMGPQIMISEGALHPRLARPTEDDFRRADCLQMILKWKGAKLDQGEYERAAIDAVDNKKNTPLHYAAASGMKACVELLVKHGGDLFAENENKDTPCDCAEKQHHKDLALNLESQMVFSRDPEAEEIEAEYAALDKREPYEGLRPQDLRRLKDMLIVETADMLQAPLFTAEALLRAHDWDREKLLEAWMSNPENCCQRSGVQMPTPPPSGYNAWDTLPSPRTPRTTRSSVTSPDEISLSPGDLDTSLCDICMCSISVFEDPVDMPCGHDFCRGCWESFLNLKIQEGEAHNIFCPAYDCFQLVPVDIIESVVSKEMDKRYLQFDIKAFVENNPAIKWCPTPGCDRAVRLTKQGSNTSGSDTLSFPLLRAPAVDCGKGHLFCWECLGEAHEPCDCQTWKNWLQKITEMKPEELVGVSEAYEDAANCLWLLTNSKPCANCKSPIQKNEGCNHMQCAKCKYDFCWICLEEWKKHSSSTGGYYRCTRYEVIQHVEEQSKEMTVEAEKKHKRFQELDRFMHYYTRFKNHEHSYQLEQRLLKTAKEKMEQLSRALKETEGGCPDTTFIEDAVHVLLKTRRILKCSYPYGFFLEPKSTKKEIFELMQTDLEMVTEDLAQKVNRPYLRTPRHKIIKAACLVQQKRQEFLASVARGVAPADSPEAPRRSFAGGTWDWEYLGFASPEEYAEFQYRRRHRQRRRGDVHSLLSNPPDPDEPSESTLDIPEGGSSSRRPGTSVVSSASMSVLHSSSLRDYTPASRSENQDSLQALSSLDEDDPNILLAIQLSLQESGLALDEETRDFLSNEASLGAIGTSLPSRLDSVPRNTDSPRAALSSSELLELGDSLMRLGAENDPFSTDTLSSHPLSEARSDFCPSSSDPDSAGQDPNINDNLLGNIMAWFHDMNPQSIALIPPATTEISADSQLPCIKDGSEGVKDVEMVLPEDSMFEDASVSEGRGTQIEENPLEENILAGEAASQAGDSGNEAANRGDGSDVSSQTPQTSSDWLEQVHLV

SEQ ID NO: 5001 - protein, 774 aa, Homo Sapiens
MERPLCSHLCSCLAMLALLSPLSLAQYDSWPHYPEYFQQPAPEYHQPQAPANVAKIQLRLAGQKRKHSEGRVEVYYDGQWGTVCDDDFSIHAAHVVCRELGYVEAKSWTASSSYGKGEGPIWLDNLHCTGNEATLAACTSNGWGVTDCKHTEDVGVVCSDKRIPGFKFDNSLINQIENLNIQVEDIRIRAILSTYRKRTPVMEGYVEVKEGKTWKQICDKHWTAKNSRVVCGMFGFPGERTYNTKVYKMFASRRKQRYWPFSMDCTGTEAHISSCKLGPQVSLDPMKNVTCENGLPAVVSCVPGQVFSPDGPSRFRKAYKPEQPLVRLRGGAYIGEGRVEVLKNGEWGTVCDDKWDLVSASVVCRELGFGSAKEAVTGSRLGQGIGPIHLNEIQCTGNEKSIIDCKFNAESQGCNHEEDAGVRCNTPAMGLQKKLRLNGGRNPYEGRVEVLVERNGSLVWGMVCGQNWGIVEAMVVCRQLGLGFASNAFQETWYWHGDVNSNKVVMSGVKCSGTELSLAHCRHDGEDVACPQGGVQYGAGVACSETAPDLVLNAEMVQQTTYLEDRPMFMLQCAMEENCLSASAAQTDPTTGYRRLLRFSSQIHNNGQSDFRPKNGRHAWIWHDCHRHYHSMEVFTHYDLLNLNGTKVAEGHKASFCLEDTECEGDIQKNYECANFGDQGITMGCWDMYRHDIDCQWVDITDVPPGDYLFQVVINPNFEVAESDYSNNIMKCRSRYDGHRIWMYNCHIGGSFSEETEKKFEHFSGLLNNQLSPQ

SEQ ID NO: 5002 - protein, 371 aa, Homo Sapiens
MAAAAAGLGGGGAGPGPEAGDFLARYRLVSNKLKKRFLRKPNVAEAGEQFGQLGRELRAQECLPYAAWCQLAVARCQQALFHGPGEALALTEAARLFLRQERDARQRLVCPAAYGEPLQAAASALGAAVRLHLELGQPAAAAALCLELAAALRDLGQPAAAAGHFQRAAQLQLPQLPLAALQALGEAASCQLLARDYTGALAVFTRMQRLAREHGSHPVQSLPPPPPPAPQPGPGATPALPAALLPPNSGSAAPSPAALGAFSDVLVRCEVSRVLLLLLLQPPPAKLLPEHAQTLEKYSWEAFDSHGQESSGQLPEELFLLLQSLVMATHEKDTEAIKSLQVEMWPLLTAEQNHLLHLVLQETISPSGQGV

SEQ ID NO: 5003 - protein, 79 aa, Homo Sapiens
MAHKQIYYSDKYFDEHYEYRHVMLPRELSKQVPKTHLMSEEEWRRLGVQQSLGWVHYMIHEPEPHILLFRRPLPKDQQK

SEQ ID NO: 5004 - protein, 182 aa, Homo Sapiens
MGDEEKRNRAITARRQHLKSVMLQIAATELEKEESRREAEKQNYLAEHCPPLHIPGSMSEVQELCKQLHAKIDAAEEEKYDMEVRVQKTSKELEDMNQKLFDLRGKFKRPPLRRVRMSADAMLKALLGSKHKVCMDLRANLKQVKKEDTEKERDLRDVGDWRKNIEEKSGMEGRKKMFESES

SEQ ID NO: 5005 - protein, 116 aa, Homo Sapiens
MAGVLKKTTGLVGLAVCNTPHERLRILYTKILDVLEEIPKNAAYRKYTEQITNEKLAMVKAEPDVKKLEDQLQGGQLEEVILQAEHELNLARKMREWKLWEPLVEEPPADQWKWPI

SEQ ID NO: 5006 - protein, 776 aa, Homo Sapiens
MALSSEPAEMPRQFPKLNISEVDEQVRLLAEKVFAKVLREEDSKDALSLFTVPEDCPIGQKEAKERELQKELAEQKSVETAKRKKSFKMIRSQSLSLQMPPQQDWKGPPAASPAMSPTTPVVTGATSLPTPAPYAMPEFQRVTISGDYCAGITLEDYEQAAKSLAKALMIREKYARLAYHRFPRITSQYLGHPRADTAPPEEGLPDFHPPPLPQEDPYCLDDAPPNLDYLVHMQGGILFVYDNKKMLEHQEPHSLPYPDLETYTVDMSHILALITDGPTKTYCHRRLNFLESKFSLHEMLNEMSEFKELKSNPHRDFYNVRKVDTHIHAAACMNQKHLLRFIKHTYQTEPDRTVAEKRGRKITLRQVFDGLHMDPYDLTVDSLDVHAGRQTFHRFDKFNSKYNPVGASELRDLYLKTENYLGGEYFARMVKEVARELEESKYQYSEPRLSIYGRSPEEWPNLAYWFIQHKVYSPNMRWIIQVPRIYDIFRSKKLLPNFGKMLENIFLPLFKATINPQDHRELHLFLKYVTGFDSVDDESKHSDHMFSDKSPNPDVWTSEQNPPYSYYLYYMYANIMVLNNLRRERGLSTFLFRPHCGEAGSITHLVSAFLTADNISHGLLLKKSPVLQYLYYLAQIPIAMSPLSNNSLFLEYSKNPLREFLHKGLHVSLSTDDPMQFHYTKEALMEEYAIAAQVWKLSTCDLCEIARNSVLQSGLSHQEKQKFLGQNYYKEGPEGNDIRKTNVAQIRMAFRYETLCNELSFLSDAMKSEEITALTN

SEQ ID NO: 5007 - protein, 329 aa, Homo Sapiens
MWGLKVLLLPVVSFALYPEEILDTHWELWKKTHRKQYNNKVDEISRRLIWEKNLKYISIHNLEASLGVHTYELAMNHLGDMTSEEVVQKMTGLKVPLSHSRSNDTLYIPEWEGRAPDSVDYRKKGYVTPVKNQGQCGSCWAFSSVGALEGQLKKKTGKLLNLSPQNLVDCVSENDGCGGGYMTNAFQYVQKNRGIDSEDAYPYVGQEESCMYNPTGKAAKCRGYREIPEGNEKALKRAVARVGPVSVAIDASLTSFQFYSKGVYYDESCNSDNLNHAVLAVGYGIQKGNKHWIIKNSWGENWGNKGYILMARNKNNACGIANLASFPKM

SEQ ID NO: 5008 - protein, 643 aa, Homo Sapiens
MGLLPKLGVSQGSDTSTSRAGRCARSVFGNIKVFVLCQGLLQLCQLLYSAYFKSSLTTIEKRFGLSSSSSGLISSLNEISNAILIIFVSYFGSRVHRPRLIGIGGLFLAAGAFILTLPHFLSEPYQYTLASTGNNSRLQAELCQKHWQDLPPSKCHSTTQNPQKETSSMWGLMVVAQLLAGIGTVPIQPFGISYVDDFSEPSNSPLYISILFAISVFGPAFGYLLGSIMLQIFVDYGRVNTAAVNLVPGDPRWIGAWWLGLLISSALLVLTSFPFFFFPRAMPIGAKRAPATADEARKLEEAKSRGSLVDFIKRFPCIFLRLLMNSLFVLVVLAQCTFSSVIAGLSTFLNKFLEKQYGTSAAYANFLIGAVNLPAAALGMLFGGILMKRFVFSLQTIPRIATTIITISMILCVPLFFMGCSTPTVAEVYPPSTSSSIHPQSPACRRDCSCPDSIFHPVCGDNGIEYLSPCHAGCSNINMSSATSKQLIYLNCSCVTGGSASAKTGSCPVPCAHFLLPAIFLISFVSLIACISHNPLYMMVLRVVNQEEKSFAIGVQFLLMRLLAWLPSPALYGLTIDHSCIRWNSLCLGRRGACAYYDNDALRDRYLGLQMGYKALGMLLLCFISWRVKKNKEYNVQKAAGLI

SEQ ID NO: 5009 - protein, 314 aa, Homo Sapiens [sequence omitted]

SEQ ID NO: 5010 - protein, 430 aa, Homo Sapiens
MPAGRARTCALLALCLLGPQDFGPTRFICTSVPVDADMCAASVAAGGAEELRSSNVLQLRETVLQQKETILSQKETIRELTAKLGRCESQSTLDPGAGEARAGGGRKQPGSGKNTMGDLSRTPAAETLSQLGQTLQSLKTRLENLEQYSRLNSSSQTNSLKDLLQSKIDELERQVLSRVNTLEEGKGGPKNDTEERVKIETALTSLHQRISELEKGQKDNRPGDKFQLTFPLRTNYMYAKVKKSLPEMYAFTVCMWLKSSATPGVGTPFSYAVPGQANELVLIEWGNNPMEILINDKVAKLPFVINDGKWHHICVTWTTRDGVWEAYQDGTQGGSGENLAPYHPIKPQGVLVLGQEQDTLGGGFDATQAFVGELAHFNIWDRKLTPGEVYNLATCSTKALSGNVIAWAESHIEIYGGATKWTFEACRQIN

SEQ ID NO: 5011 - protein, 563 aa, Homo Sapiens
MPEDDQRATRNLFIGNLDHSVSEVELRRAFEKYGIIEEVVIKRPARGQGGAYAFLKFQNLDMAHRAKVAMSGRVIGRNPIKIGYGKANPTTRLWVGGLGPNTSLAALAREFDRFGSIRTIDHVKGDSFAYIQYESLDAAQAACAKMRGFPLGGPDRRLRVDFAKAEETRYPQQYQPSPLPVHYELLTDGYTRHRNLDADLVRDRTPPHLLYSDRDRTFLEGDWTSPSKSSDRRNSLEGYSRSVRSRSGERWGADGDRGLPKPWEERRKRRSLSSDRGRTTHSPYEERSRTKGSGQQSERGSDRTPERSRKENHSSEGTKESSSNSLSNSRHGAEERGHHHHHHEAADSSHGKKARDSERNHRTTEAEPKPLEEPKHETKKLKNLSEYAQTLQLGWNGLLVLKNSCFPTSMHILEGDQGVISSLLKDHTSGSKLTQLKIAQRLRLDQPKLDEVTRRIKQGSPNGYAVLLATQATPSGLGTEGMPTVEPGLQRRLLRNLVSYLKQKQAAGVISLPVGGSKGRDGTGMLYAFPPCDFSQQYLQSALRTLGKLEEEHMVIVIVRDTA

SEQ ID NO: 5012 - protein, 206 aa, Homo Sapiens
MAEDADMRNELEEMQRRADQLADESLESTRRMLQLVEESKDAGIRTLVMLDEQGEQLDRVEEGMNHINQDMKEAEKNLKDLGKCCGLFICPCNKLKSSDAYKKAWGNNQDGVVASQPARVVDEREQMAISGGFIRRVTNDARENEMDENLEQVSGIIGNLRHMALDMGNEIDTQNRQIDRIMEKADSNKTRIDEANQRATKMLGSG

SEQ ID NO: 5013 - protein, 421 aa, Homo Sapiens
MSPKRIAKRRSPPADAIPKSKKVKVSHRSHSTEPGLVLTLGQGDVGQLGLGENVMERKKPALVSIPEDVVQAEAGGMHTVCLSKSGQVYSFGCNDEGALGRDTSVEGSEMVPGKVELQEKVVQVSAGDSHTAALTDDGRVFLWGSFRDNNGVIGLLEPMKKSMVPVQVQLDVPVVKVASGNDHLVMLTADGDLYTLGCGEQGQLGRVPELFANRGGRQGLERLLVPKCVMLKSRGSRGHVRFQDAFCGAYFTFAISHEGHVYGFGLSNYHQLGTPGTESCFIPQNLTSFKNSTKSWVGFSGGQHHTVCMDSEGKAYSLGRAEYGRLGLGEGAEEKSIPTLISRLPAVSSVACGASVGYAVTKDGRVFAWGMGTNYQLGTGQDEDAWSPVEMMGKQLENRVVLSVSSGGQHTVLLVKDKEQS

SEQ ID NO: 5014 - protein, 390 aa, Homo Sapiens
MKIDAFHYVQLGTAYRGLQPVPDEEVIELYGGTQHIPLYQMSGFYGKGPSIKQFMDIFSLPEMALLSCVVDYFLGHSLEFDQAHLYKDVTDAIRDVHVKGLMYQWIEQDMEKYILRGDETFAVLSRLVAHGKQLFLITNSPFSFVDKGMRHMVGPDWRQLFDVVIVQADKPSFFTDRRKPFRKLDEKGSLQWDRITRLEKGKIYRQGNLFDFLRLTEWRGPRVLYFGDHLYSDLADLMLRHGWRTGAIIPELEREIRIINTEQYMHSLTWQQALTGLLERMQTYQDAESRQVLAAWMKERQELRCITKALFNAQFGSIFRTFHNPTYFSRRLVRFSDLYMASLSCLLNYRVDFTFYPRRTPLQHEAPLWMDQLCTGCMKTPFLGDMAHIR

SEQ ID NO: 5015 - protein, 2013 aa, Homo Sapiens
KMATPLAVNSAASLWGPYKDIWHKVGNALWRRQPEAVHLLDKILKKHKPDFISLFKNPPKNVQQHEKVQKASTEGVAIQGQQGTRLLPEQLIKEAFILSDLFDIGELAAVELLLAGEHQQPHFPGLTRGLVAVLLYWDGKRCIANSLKALIQSRRGKTWTLELSPELASMTTRFTDELMEQGLTYKVLTLVSQIDVNNEFEKLQRERGLGSEKHRKEVSDLIKECRQSLAESLFAWACQSPLGKEDTLLLIGHLERVTVEANGSLDAVNLALLMALLYCFDISFIEQSTEERDDMIHQLPLLTEKQYIATIHSRLQDSQLWKLPGLQATVRLAWALALRGISQLPDVTALAEFTEADEAMAELAIADNVFLFLMESVVVSEYFYQEEFYIRRVHNLITDFLALMPMKVKQLRNRADEDARMIHMSMQMGNEPPISLRRDLEHLMLLIGELYKKNPFHLELALEYWCPTEPLQTPTIMGSYLGVAHQRPPQRQVVLSKFVRQMGDLLPPTIYIPYLKMLQGLANGPQCAHYCFSLLKVNGSSHVENIQGAGGSPVSWEHFFHSLMLYHEHLRKDLPSADSVQYRHLPSRGITQKEQDGLIAFLQLTSTIITWSENARLALCEHPQWTPVVVILGLLQCSIPPVLKAELLKTLAAFGKSPEIAASLWQSLEYTQILQTVRIPSQRQAIGIEVELNEIESRCEEYPLTRAFCQLISTLVESSFPSNLGAGLRPPGFDPYLQFLRDSVFLRFRTRAYRRAAEKWEVAEVVLEVFYKLLRDYEPQLEDFVDQFVELQGEEIIAYKPPGFSLMYHLLNESPMLELALSLLEEGVKQLDTYAPFPGKKHLEKAVQHCLALLNLTLQKENLFMDLLRESQLALIVCPLEQLLQGINPRTKKADNVVNIARYLYHGNTNPELAFESAKILCCISCNSNIQIKLVGDFTHDQSISQKLMAGFVECLDCEDAEEFVRLEEGSELEKKLVAIRHETRIHILNLLITSLECNPPNLALYLLGFELKKPVSTTNLQDPGVLGCPRTCLHAILNILEKGTEGRTGPVAVRESPQLAELCYQVIYQLCACSDTSGPTMRYLRTSQDFLFSQLQYLPFSNKEYEISMLNQMSWLMKTASIELRVTSLNRQRSHTQRLLHLLLDDMPVKPYSDGEGGIEDENRSVSGFLHFDTATKVRRKILNILDSIDFSQEIPEPLQLDFFDRAQIEQVIANCEHKNLRGQTVCNVKLLHRVLVAEVNALQGMAAIGQRPLLMEEISTVLQYVVGRNKLLQCLHAKRHALESWRQLVEIILTACPQDLIQAEDRQLIIRDILQDVHDKILDDEAAQELMPVVAGAVFTLTAHLSQAVLTEQKQTSVLGPAEAHYAFMLDSCFTSPPPEENPLVGFASIGDSSLYIILKKLLDFILKTGGGFQRVRTHLYGSLLYYLQIAQRPDEPDTLEAAKKTMWERLTAPEDVFSKLQRENIAIIESYGAALMEVVCRDACDGHEIGRMLALALLDRIVSVDKQQQWLLYLSNSGYLKVLVDSLVEDDRTLQSLLTPQPPLLKALYTYESKMAFLTRVAKIQQGALELLRSGVIVRLAQCQVYDMRPETDPQSMFGMRDPPMFIPTPVDRYRQILLPALQLCQVILTSSMAQHLQAAGQVLQFLISHSDTIQAILRCQDVSAGSLQELALLTGIISKAALPGILSELDVDVNEGSLMELQGHIGRFQRQCLGLLSRFGGSDRLRQFKFQDDNVEGDKVSKKDEIELAMQQICANVMEYCQSLMLQSSPTFQHAVCLFTPSLSETVNRDGPRQDTQAPVVPYWRLPGLGIIIYLLKQSANDFFSYYDSHRQSVSKLQNVEQLPPDEIKELCQSVMPAGVDKISTAQKYVLARRRLVKVINNRAKLLSLCSFIIETCLFILWRHLEYYLLHCMPTDSQDSLFASRTLFKSRRLQDSFASETNLDFRSGLAIVSQHDLDQLQADAINAFGESLQKKLLDIEGLYSKVRSRYSFIQALVRRIRGLLRISRN

SEQ ID NO: 5016 - protein, 606 aa, Homo Sapiens
MPYEIKKVFASLPQVERGVSKIIGGDPKGNNFLYTNGKCVILRNIDNPALADIYTEHAHQVVVAKYAPSGFYIASGDVSGKLRIWDTTQKEHLLKYEYQPFAGKIKDIAWTEDSKRIAVVGEGREKFGAVFLWDSGSSVGEITGHNKVINSVDIKQSRPYRLATGSDDNCAAFFEGPPFKFKFTIGDHSRFVNCVRFSPDGNRFATASADGQIYIYDGKTGEKVCALGGSKAHDGGIYAISWSPDSTHLLSASGDKTSKIWDVSVNSVVSTFPMGSTVLDQQLGCLWQKDHLLSVSLSGYINYLDRNNPSKPLHVIKGHSKSIQCLTVHKNGGKSYIYSGSHDGHINYWDSETGENDSFAGKGHTNQVSRMTVDESGQLISCSMDDTVRYTSLMLRDYSGQGVVKLDVQPKCVAVGPGGYAVVVCIGQIVLLKDQRKCFSIDNPGYEPEVVAVHPGGDTVAIGGVDGNVRLYSILGTTLKDEGKLLEAKGPVTDVAYSHDGAFLAVCDASKVVTVFSVADGYSENNVFYGHHAKIVCLAWSPDNEHFASGGMDMMVYVWTLSDPETRVKIQDAHRLHHVSSLAWLDEHTLVTTSHDASVKEWTITY

SEQ ID NO: 5017 - protein, 173 aa, Homo Sapiens [sequence omitted]

SEQ ID NO: 5018 - protein, 385 aa, Homo Sapiens [sequence omitted]

SEQ ID NO: 5019 - protein, 292 aa, Homo Sapiens
MEGLSKHKQQRGTTEIGSHFPVGVVPPRAKSPTPESSTIASYVTLRKTKKMMDLRTERPRSAVEQLCLAESTRPRMTVEEQMERIRRHQQACLREKKKGLNVIGASDQSPLQSPSNLRDNPFRTTQTRRRDDKELDTAIRENDVKSDHETPATEIVQLKETEPQNVDFSKELKKTENISYEMLFEPEPNGVNSVEMMDKERNKDKMPEDVTFSPQDETQTANHKPEEHPEENTKNSVDEQEETVISYESTPEVSRGNQTMAVKSLSPSPESSASPVPSTQPQLTEGSHFMCV

SEQ ID NO: 5020 - protein, 1455 aa, Homo Sapiens
MSDSWVPNSASGQDPGGRRRAWAELLAGRVKREKYNPERAQKLKESAVRLLRSHQDLNALLLEVEGPLCKKLSLSKVIDCDSSEAYANHSSSFIGSALQDQASRLGVPVGILSAGMVASSVGQICTAPAETSHPVLLTVEQRKKLSSLLEFAQYLLAHSMFSRLSFCQELWKIQSSLLLEAVWHLHVQGIVSLQELLESHPDMHAVGSWLFRNLCCLCEQMEASCQHADVARAMLSDFVQMFVLRGFQKNSDLRRTVEPEKMPQVTVDVLQRMLIFALDALAAGVQEESSTHKIVRCWFGVFSGHTLGSVISTDPLKRFFSHTLTQILTHSPVLKASDAVQMQREWSFARTHPLLTSLYRRLFVMLSAEELVGHLQEVLETQEVHWQRVLSFVSALVVCFPEAQQLLEDWVARLMAQAFESCQLDSMVTAFLVVRQAALEGPSAFLSYADWFKASFGSTRGYHGCSKKALVFLFTFLSELVPFESPRYLQVHILHPPLVPSKYRSLLTDYISLAKTRLADLKVSIENMGLYEDLSSAGDITEPHSQALQDVEKAIMVFEHTGNIPVTVMEASIFRRPYYVSHFLPALLTPRVLPKVPDSRVAFIESLKRADKIPPSLYSTYCQACSAAEEKPEDAALGVRAEPNSAEEPLGQLTAALGELRASMTDPSQRDVISAQVAVISERLRAVLGHNEDDSSVEISKIQLSINTPRLEPREHIAVDLLLTSFCQNLMAASSVAPPERQGPWAALFVRTMCGRVLPAVLTRLCQLLRHQGPSLSAPHVLGLAALAVHLGESRSALPEVDVGPPAPGAGLPVPALFDSLLTCRTRDSLFFCLKFCTAAISYSLCKFSSQSRDTLCSCLSPGLIKKFQFLMFRLFSEARQPLSEEDVASLSWRPLHLPSADWQRAALSLWTHRTFREVLKEEDVHLTYQDWLHLELEIQPEADALSDTERQDFHQWAIHEHFLPESSASGGCDGDLQAACTILVNALMDFHQSSRSYDHSENSDLVFGGRTGNEDIISRLQEMVADLELQQDLIVPLGHTPSQEHFLFEIFRRRLQALTSGWSVAASLQRQRELLMYKRILLRLPSSVLCGSSFQAEQPITARCEQFFHLVNSEMRNFCSHGGALTQDITAHFFRGLLNACLRSRDPSLMVDFILAKCQTKCPLILTSALVWWPSLEPVLLCRWRRHCQSPLPRELQKLQEGRQFASDFLSPEAASPAPNPDWLSAAALHFAIQQVREENIRKQLKKLDCEREELLVFLFFFSLMGLLSSHLTSNSTTDLPKAFHVCAAILECLEKRKISWLALFQLTESDLRLGRLLLRVAPDQHTRLLPFAFYSLLSYFHEDAAIREEAFLHVAVDMYLKLVQLFVAGDTSTVSPPAGRSLELKGQGNPVELITKARLFLLQLIPRCPKKSFSHVAELLADRGDCDPEVSAALQSRQQAAPDADLSQEPHLF

SEQ ID NO: 5021 - protein, 336 aa, Homo Sapiens [sequence omitted]

SEQ ID NO: 5022 - protein, 465 aa, Homo Sapiens
MRKGIQPALEQYLVTAGGGEGAAVVAAAAAASMDKRALLASPGFAAAAAAAAAPGAYIQILTTNTSTTSCSSSLQSGAVAAGPLLPSAPGAEQTAGSLLYTTPHGPSSRAGLLQQPPALGRGGSGGGGGPPAKRRLELGESGHQYLSDGLKTPKGKGRAALRSPDSPKTPKSPSEKTRYDTSLGLLTKKFIQLLSQSPDGVLDLNKAAEVLKVQKRRIYDITNVLEGIHLIKKKSKNNVQWMGCSLSEDGGMLAQCQGLSKEVTELSQEEKKLDELIQSCTLDLKLLTEDSENQRLAYVTYQDIRKISGLKDQTVIVVKAPPETRLEVPDSIESLQIHLASTQGPIEVYLCPEETETHSPMKTNNQDHNGNIPKPASKDLASTNSGHSDCSVSMGNLSPLASPANLLQQTEDQIPSNLEGPFVNLLPPLLQEDYLLSLGEEEGISDLFDAYDLEKLPLVEDFMCS

SEQ ID NO: 5023 - protein, 314 aa, Homo Sapiens
MYKMEYSYLNSSAYESCMAGMDTSSLASAYADFSSCSQASGFQYNPIRTTFGATSGCPSLTPGSCSLGTLRDHQSSPYAAVPYKLFTDHGGLNEKRKQRRIRTTFTSAQLKELERVFAETHYPDIYTREELALKIDLTEARVQVWFQNRRAKFRKQERAAAAAAAAAKNGSSGKKSDSSRDDESKEAKSTDPDSTGGPGPNPNPTPSCGANGGGGGGPSPAGAPGAAGPGGPGGEPGKGGAAAAAAAAAAAAAAAAAAAAGGLAAAGGPGQGWAPGPGPITSIPDSLGGPFGSVLSSLQRPNGAKAALVKSSMF

SEQ ID NO: 5024 - protein, 180 aa, Homo Sapiens
MQAEGRGTGGSTGDADGPGGPGIPDGPGGNAGGPGEAGATGGRGPRGAGAARASGPGGGAPRGPHGGAASGLNGCCRCGARGPESRLLEFYLAMPFATPMEAELARRSLAQDAPPLPVPGVLLKEFTVSGNILTIRLTAADHRQLQLSISSCLQQLSLLMWITQCFLPVFLAQPPSGQRR

SEQ ID NO: 5025 - protein, 494 aa, Homo Sapiens
MGQPREFWHLRSQVPVPTCHLLTVQPWCLLPHPTPAGGRERRHSASSLLAALCLRKAVLRPHPAVLPGVGGCVVLSSGRMKAPLRGGLALGTGPAPTKLQLLHDWQSEPGPSGWQQGPSPPLFPAGTSLVQHLMTVLIRKHSQLFTAPVPEGPTSPRGGLQCAVGWGSEEVTRDSQGEPGGPGLPAHRTSSLDGAAVAVLSRTAPTGPGSRCSPGKKVQTLPSWKSSFRQPRSLSGSPKGGGSSLEVPIISSGGNWLMNGLSSLRGHRRASSGDRLKDSGSVQRLSTYDNVPAPGLVPGIPSVASMAWSGASSSESSVGGSLSSCTACRASDSSARSSLHTDWALEPSPLPSSSEDPKSLDLDHSMDEAGAGASNSEPSEPDSPTREHARRSEALQGLVTELRAELCRQRTEYERSVKRIEEGSADLRKRMSRLEEELDQEKKKYIMLEIKLRNSERAREDAERRNQLLQREMEEFFSTLGSLTVGAKGARAPK

SEQ ID NO: 5026 - protein, 208 aa, Homo Sapiens
MEAPPVTMMPVTGGTINMMEYLLQGSVLDHSLESLIHRLRGLCDNMEPETFLDHEMVFLLKGQQASPFVLRARRSMDRAGAPWHLRYLGQPEMGDKNRHALVRNCVDIATSENLTDFLMEMGFRMDHEFVAKGHLFRKGIMKIMVYKTFRILVPGNTDSTEALSLSYLVELSVVAPAGQDMVSDDMKNFAEQLKPLVHLEKIDPKRLM

SEQ ID NO: 5027 - protein, 351 aa, Homo Sapiens
MGNAATAKKGSEVESVKEFLAKAKEDFLKKWENPTQNNAGLEDFERKKTLGTGSFGRVMLVKHKATEQYYAMKILDKQKVVKLKQIEHTLNEKRILQAVNFPFLVRLEYAFKDNSNLYMVMEYVPGGEMFSHLRRIGRFSEPHARFYAAQIVLTFEYLHSLDLIYRDLKPENLLIDHQGYIQVTDFGFAKRVKGRTWTLCGTPEYLAPEIILSKGYNKAVDWWALGVLIYEMAAGYPPFFADQPIQIYEKIVSGKVRFPSHFSSDLKDLLRNLLQVDLTKRFGNLKNGVSDIKTHKWFATTDWIAIYQRKVEAPFIPKFRGSGDTSNFDDYEEEDIRVSITEKCAKEFGEF

SEQ ID NO: 5028 - protein, 492 aa, Homo Sapiens
MEPGLEHALRRTPSWSSLGGSEHQEMSFLEQENSSSWPSPAVTSSSERIRGKRRAKALRWTRQKSVEEGEPPGQGEGPRSRPAAESTGLEATFPKTTPLAQADPAGVGTPPTGWDCLPSDCTASAAGSSTDDVELATEFPATEAWECELEGLLEERPALCLSPQAPFPKLGWDDELRKPGAQIYMRFIEEHTCYDAMATSSKLVIFDTMLEIKKAFFALVANGVRAAPLWDSKKQSFVGMLTITDFILVLHRYYRSPLVQIYEIEQHKIETWREIYLQGCFKPLVSISPNDSLFEAVYTLIKNRIHRLPVLDPVSGNVLHILTHKRLLKFLHIFGSLLPRPSFLYRTIQDLGIGTFRDLAVVLETAPILTALDIFVDRRVSALPVVNECGQVVGLYSRFDVIHLAAQQTYNHLDMSVGEALRKRTLCLEGVLSCQPHESLGEVIDRIAREQVHRLVLVDETQHLLGVVSLSDILQALVLSPAGIDPSGPEKI

SEQ ID NO: 5029 - protein, 482 aa, Homo Sapiens
MAQTQGTRRKVCYYYDGDVGNYYYGQGHPMKPHRIRMTHNLLLNYGLYRKMEIYRPHKANAEEMTKYHSDDYIKFLRSIRPDNMSEYSKQMQRFNVGEDCPVFDGLFEFCQLSTGGSVASAVKLNKQQTDIAVNWAGGLHHAKKSEASGFCYVNDIVLAILELLKYHQRVLYIDIDIHHGDGVEEAFYTTDRVMTVSFHKYGEYFPGTGDLRDIGAGKGKYYAVNYPLRDGIDDESYEAIFKPVMSKVMEMFQPSAVVLQCGSDSLSGDRLGCFNLTIKGHAKCVEFVKSFNLPMLMLGGGGYTIRNVARCWTYETAVALDTEIPNELPYNDYFEYFGPDFKLHISPSNMTNQNTNEYLEKIKQRLFENLRMLPHAPGVQMQAIPEDAIPEESGDEDEDDPDKRISICSSDKRIACEEEFSDSEEEGEGGRKNSSNFKKAKRVKTEDEKEKDPEEKKEVTEEEKTKEEKPEAKGVKEEVKLA

SEQ ID NO: 5030 - protein, 305 aa, Homo Sapiens
MSRELAPLLLLLLSIHSALAMRICSFNVRSFGESKQEDKNAMDVIVKVIKRCDIILVMEIKDSNNRICPILMEKLNRNSRRGITYNYVISSRLGRNTYKEQYAFLYKEKLVSVKRSYHYHDYQDGDADVFSREPFVVWFQSPHTAVKDFVIIPLHTTPETSVKEIDELVEVYTDVKHRWKAENFIFMGDFNAGCSYVPKKAWKNIRLRTDPRFVWLIGDQEDTTVKKSTNCAYDRIVLRGQEIVSSVVPKSNSVFDFQKAYKLTEEEALDVSDHFPVEFKLQSSRAFTNSKKSVTLRKKTKSKRS

SEQ ID NO: 5031 - protein, 291 aa, Homo Sapiens
MSCQAFTSADTFIPLNSDASATLPLIMHHSAAECLPVSNHATNVMSTATGLHYSVPSCHYGNQPSTYGVMAGSLTPCLYKFPDHTLSHGFPPIHQPLLAEDPTAADFKQELRRKSKLVEEPIDMDSPEIRELEKFANEFKVRRIKLGYTQTNVGEALAAVHGSEFSQTTICRFENLQLSFKNACKLKAILSKWLEEAEQVGALYNEKVGANERKRKRRTTISIAAKDALERHFGEQNKPSSQEIMRMAEELNLEKEVVRVWFCNRRQREKRVKTSLNQSLFSISKEHLECR

SEQ ID NO: 5032 - protein, 267 aa, Homo Sapiens
MASPSKGNDLFSPDEEGPAVVAGPGPGPGGAEGAAEERRVKVSSLPFSVEALMSDKKPPKEASPLPAESASAGATLRPLLLSGHGAREAHSPGPLVKPFETASVKSENSEDGAAWMQEPGRYSPPPRHTSPTTCTLRKHKTNRKPRTPFTTSQLLALERKFRQKQYLSIAERAEFSSSLNLTETQVKIWFQNRRAKAKRLQEAELEKLKMAAKPMLPSSFSLPFPISSPLQAASIYGASYPFHRPVLPIPPVGLYATPVGYGMYHLS

SEQ ID NO: 5033 - protein, 1531 aa, Homo Sapiens
MALRGFCSADGSDPLWDWNVTWNTSNPDFTKCFQNTVLVWVPCFYLWACFPFYFLYLSRHDRGYIQMTPLNKTKTALGFLLWIVCWADLFYSFWERSRGIFLAPVFLVSPTLLGITTLLATFLIQLERRKGVQSSGIMLTFWLVALVCALAILRSKIMTALKEDAQVDLFRDITFYVYFSLLLIQLVLSCFSDRSPLFSETIHDPNPCPESSASFLSRITFWWITGLIVRGYRQPLEGSDLWSLNKEDTSEQVVPVLVKNWKKECAKTRKQPVKVVYSSKDPAQPKESSKVDANEEVEALIVKSPQKEWNPSLFKVLYKTFGPYFLMSFFFKAIHDLMMFSGPQILKLLIKFVNDTKAPDWQGYFYTVLLFVTACLQTLVLHQYFHICFVSGMRIKTAVIGAVYRKALVITNSARKSSTVGEIVNLMSVDAQRFMDLATYINMIWSAPLQVILALYLLWLNLGPSVLAGVAVMVLMVPVNAVMAMKTKTYQVAHMKSKDNRIKLMNEILNGIKVLKLYAWELAFKDKVLAIRQEELKVLKKSAYLSAVGTFTWVCTPFLVALCTFAVYVTIDENNILDAQTAFVSLALFNILRFPLNILPMVISSIVQASVSLKRLRIFLSHEELEPDSIERRPVKDGGGTNSITVRNATFTWARSDPPTLNGITFSIPEGALVAVVGQVGCGKSSLLSALLAEMDKVEGHVAIKGSVAYVPQQAWIQNDSLRENILFGCQLEEPYYRSVIQACALLPDLEILPSGDRTEIGEKGVNLSGGQKQRVSLARAVYSNADIYLFDDPLSAVDAHVGKHIFENVIGPKGMLKNKTRILVTHSMSYLPQVDVIIVMSGGKISEMGSYQELLARDGAFAEFLRTYASTEQEQDAEENGVTGVSGPGKEAKQMENGMLVTDSAGKQLQRQLSSSSSYSGDISRHHNSTAELQKAEAKKEETWKLMEADKAQTGQVKLSVYWDYMKAIGLFISFLSIFLFMCNHVSALASNYWLSLWTDDPIVNGTQEHTKVRLSVYGALGISQGIAVFGYSMAVSIGGILASRCLHVDLLHSILRSPMSFFERTPSGNLVNRFSKELDTVDSMIPEVIKMFMGSLFNVIGACIVILLATPIAAIIIPPLGLIYFFVQRFYVASSRQLKRLESVSRSPVYSHFNETLLGVSVIRAFEEQERFIHQSDLKVDENQKAYYPSIVANRWLAVRLECVGNCIVLFAALFAVISRHSLSAGLVGLSVSYSLQVTTYLNWLVRMSSEMETNIVAVERLKEYSETEKEAPWQIQETAPPSSWPQVGRVEFRNYCLRYREDLDFVLRHINVTINGGEKVGIVGRTGAGKSSLTLGLFRINESAEGEIIIDGINIAKIGLHDLRFKITIIPQDPVLFSGSLRMNLDPFSQYSDEEVWTSLELAHLKDFVSALPDKLDHECAEGGENLSVGQRQLVCLARALLRKTKILVLDEATAAVDLETDDLIQSTIRTQFEDCTVLTIAHRLNTIMDYTRVIVLDKGEIQEYGAPSDLLQQRGLFYSMAKDAGLV

SEQ ID NO: 5034 - protein, 240 aa, Homo Sapiens
MSRSNRQKEYKCGDLVFAKMKGYPHWPARIDEMPEAAVKSTANKYQVFFFGTHETAFLGPKDLFPYEESKEKFGKPNKRKGFSEGLWEIENNPTVKASGYQSSQKKSCVEEPEPEPEAAEGDGDKKGNAEGSSDEEGKLVIDEPAKEKNEKGALKRRAGDLLEDSPKRPKEAENPEGEEKEAATLEVERPLPMEVEKNSTPSEPGSGRGPPQEEEEEEDEEEEATKEDAEAPGIRDHESL

SEQ ID NO: 5035 - protein, 487 aa, Homo Sapiens
MRENMARGPCNAPRWVSLMVLVAIGTAVTAAVNPGVVVRISQKGLDYASQQGTAALQKELKRIKIPDYSDSFKIKHLGKGHYSFYSMDIREFQLPSSQISMVPNVGLKFSISNANIKISGKWKAQKRFLKMSGNFDLSIEGMSISADLKLGSNPTSGKPTITCSSCSSHINSVHVHISKSKVGWLIQLFHKKIESALRNKMNSQVCEKVTNSVSSKLQPYFQTLPVMTKIDSVAGINYGLVAPPATTAETLDVQMKGEFYSENHHNPPPFAPPVMEFPAAHDRMVYLGLSDYFFNTAGLVYQEAGVLKMTLRDDMIPKESKFRLTTKFFGTFLPEVAKKFPNMKIQIHVSASTPPHLSVQPTGLTFYPAVDVQAFAVLPNSSLASLFLIGMHTTGSMEVSAESNRLVGELKLDRLLLELKHSNIGPFPVELLQDIMNYIVPILVLPRVNEKLQKGFPLPTPARVQLYNVVLQPHQNFLLFGADVVYK

SEQ ID NO: 5036 - protein, 510 aa, Homo Sapiens
MPRGFLVKRSKKSTPVSYRVRGGEDGDRALLLSPSCGGARAEPPAPSPVPGPLPPPPPAERAHAALAAALACAPGPQPPPQGPRAAHFGNPEAAHPAPLYSPTRPVSREHEKHKYFERSFNLGSPVSAESFPTPAALLGGGGGGGASGAGGGGTCGGDPLLFAPAELKMGTAFSAGAEAARGPGPGPPLPPAAALRPPGKRPPPPTAAEPPAKAVKAPGAKKPKAIRKLHFEDEVTTSPVLGLKIKEGPVEAPRGRAGGAARPLGEFICQLCKEEYADPFALAQHKCSRIVRVEYRCPECAKVFSCPANLASHRRWHKPRPAPAAARAPEPEAAARAEAREAPGGGSDRDTPSPGGVSESGSEDGLYECHHCAKKFRRQAYLRKHLLAHHQALQAKGAPLAPPAEDLLALYPGPDEKAPQEAAGDGEGAGVLGLSASAECHLCPVCGESFASKGAQERHLRLLHAAQVFPCKYCPATFYSSPGLTRHINKCHPSENRQVILLQVPVRPAC

SEQ ID NO: 5037 - protein, 680 aa, Homo Sapiens
MVPGVPGAVLTLCLWLAASSGCLAAGPGAAAARRLDESLSAGSVQRAPCASRCLSLQITRISAFFQHFQNNGSLVWCQNHKQCSKCLEPCKESGDLRKHQCQSFCEPLFPKKSYECLTSCEFLKYILLVKQGDCPAPEKASGFAAACVESCEVDNECSGVKKCCSNGCGHTCQVPKTLYKGVPLKPRKELRFTELQSGQLEVKWSSKFNISIEPVIYVVQRRWNYGIHPSEDDATHWQTVAQTTDERVQLTDIRPSRWYQFRVAAVNVHGTRGFTAPSKHFRSSKDPSAPPAPANLRLANSTVNSDGSVTVTIVWDLPEEPDIPVHHYKVFWSWMVSSKSLVPTKKKRRKTTDGFQNSVILEKLQPDCDYVVELQAITYWGQTRLKSAKVSLHFTSTHATNNKEQLVKTRKGGIQTQLPFQRRRPTRPLEVGAPFYQDGQLQVKVYWKKTEDPTVNRYHVRWFPEACAHNRTTGSEASSGMTHENYIILQDLSFSCKYKVTVQPIRPKSHSKAEAVFFTTPPCSALKGKSHKPIGCLGEAGHVLSKVLAKPENLSASFIVQDVNITGHFSWKMAKANLYQPMTGFQVTWAEVTTESRQNSLPNSIISQSQILPSDHYVLTVPNLRPSTLYRLEVQVLTPGGEGPATIKTFRTPELPPSSAHRSHLKHRHPHHYKPSPERY

SEQ ID NO: 5038 - protein, 475 aa, Homo Sapiens
MTPGTQSPFFLLLLLTVLTVVTGSGHASSTPGGEKETSATQRSSVPSSTEKNAVSMTSSVLSSHSPGSGSSTTQGQDVTLAPATEPASGSAATWGQDVTSVPVTRPALGSTTPPAHDVTSAPDNKPAPGSTAPPAHGVTSAPDTRPAPGSTAPPAHGVTSAPDNRPALGSTAPPVHNVTSASGSASGSASTLVHNGTSARATTTPASKSTPFSIPSHHSDTPTTLASHSTKTDASSTHHSTVPPLTSSNHSTSPQLSTGVSFFFLSFHISNLQFNSSLEDPSTDYYQELQRDISEMFLQIYKQGGFLGLSNIKFRPGSVVVQLTLAFREGTINVHDVETQFNQYKTEAASRYNLTISDVSVSDVPFPFSAQSGAGVPGWGIALLVLVCVLVALAIVYLIALAVCQCRRKNYGQLDIFPARDTYHPMSEYPTYHTHGRYVPPSSTDRSPYEKVSAGNGGSSLSYTNPAVAATSANL

SEQ ID NO: 5039 - protein, 5038 aa, Homo Sapiens
MGDAEGEDEVQFLRTDDEVVLQCSATVLKEQLKLCLAAEGFGNRLCFLEPTSNAQNVPPDLAICCFVLEQSLSVRALQEMLANTVEAGVESSQGGGHRTLLYGHAILLRHAHSRMYLSCLTTSRSMTDKLAFDVGLQEDATGEACWWTMHPASKQRSEGEKVRVGDDIILVSVSSERYLHLSTASGELQVDASFMQTLWNMNPICSRCEEGFVTGGHVLRLFHGHMDECLTISPADSDDQRRLVYYEGGAVCTHARSLWRLEPLRISWSGSHLRWGQPLRVRHVTTGQYLALTEDQGLVVVDASKAHTKATSFCFRISKEKLDVAPKRDVEGMGPPEIKYGESLCFVQHVASGLWLTYAAPDPKALRLGVLKKKAMLHQEGHMDDALSLTRCQQEESQAARMIHSTNGLYNQFIKSLDSFSGKPRGSGPPAGTALPIEGVILSLQDLIIYFEPPSEDLQHEEKQSKLRSLRNRQSLFQEEGMLSMVLNCIDRLNVYTTAAHFAEFAGEEAAESWKEIVNLLYELLASLIRGNRSNCALFSTNLDWLVSKLDRLEASSGILEVLYCVLIESPEVLNIIQENHIKSIISLLDKHGRNHKVLDVLCSLCVCNGVAVRSNQDLITENLLPGRELLLQTNLINYVTSIRPNIFVGRAEGTTQYSKWYFEVMVDEVTPFLTAQATHLRVGWALTEGYTPYPGAGEGWGGNGVGDDLYSYGFDGLHLWTGHVARPVTSPGQHLLAPEDVISCCLDLSVPSISFRINGCPVQGVFESFNLDGLFFPVVSFSAGVKVRFLLGGRHGEFKFLPPPGYAPCHEAVLPRERLHLEPIKEYRREGPRGPHLVGPSRCLSHTDFVPCPVDTVQIVLPPHLERIREKLAENIHELWALTRIEQGWTYGPVRDDNKRLHPCLVDFHSLPEPERNYNLQMSGETLKTLLALGCHVGMADEKAEDNLKKTKLPKTYMMSNGYKPAPLDLSHVRLTPAQTTLVDRLAENGHNVWARDRVGQGWSYSAVQDIPARRNPRLVPYRLLDEATKRSNRDSLCQAVRTLLGYGYNIEPPDQEPSQVENQSRCDRVRIFRAEKSYTVQSGRWYFEFEAVTTGEMRVGWARPELRPDVELGADELAYVFNGHRGQRWHLGSEPFGRPWQPGDVVGCMIDLTENTIIFTLNGEVLMSDSGSETAFREIEIGDGFLPVCSLGPGQVGHLNLGQDVSSLRFFAICGLQEGFEPFAINMQRPVTTWFSKGLPQFEPVPLEHPHYEVSRVDGTVDTPPCLRLTHRTWGSQNSLVEMLFLRLSLPVQFHQHFRCTAGATPLAPPGLQPPAEDEARAAEPDPDYENLRRSAGGWSEAENGKEGTAKEGAPGGTPQAGGEAQPARAENEKDATTEKNKKRGFLFKAKKVAMMTQPPATPTLPRLPHDVVPADNRDDPEIILNTTTYYYSVRVFAGQEPSCVWAGWVTPDYHQHDMSFDLSKVRVVTVTMGDEQGNVHSSLKCSNCYMVWGGDFVSPGQQGRISHTDLVIGCLVDLATGLMTFTANGKESNTFFQVEPNTKLFPAVFVLPTHQNVIQFELGKQKNIMPLSAAMFQSERKNPAPQCPPRLEMQMLMPVSWSRMPNHFLQVETRRAGERLGWAVQCQEPLTMMALHIPEENRCMDILELSERLDLQRFHSHTLRLYRAVCALGNNRVAHALCSHVDQAQLLHALEDAHLPGPLRAGYYDLLISIHLESACRSRRSMLSEYIVPLTPETRAITLFPPGRSTENGHPRHGLPGVGVTTSLRPPHHFSPPCFVAALPAAGAAEAPARLSPAIPLEALRDKALRMLGEAVRDGGQHARDPVGASVEFQFVPVLKLVSTLLVMGIFGDEDVKQILKMIEPEVFTEEEEEEDEEEEGEEEDEEEKEEDEEETAQEKEDEEKEEEEAAEGEKEEGLEEGLLQMKLPESVKLQMCHLLEYFCDQELQHRVESLAAFAERYVDKLQANQRSRYGLLIKAFSMTAAETARRTREFRSPPQEQINMLLQFKDGTDEEDCPLPEEIRQDLLDFHQDLLAHCGIQLDGEEEEPEEETTLGSRLMSLLEKVRLVKKKEEKPEEERSAEESKPRSLQELVSHMVVRWAQEDFVQSPELVRAMFSLLHRQYDGLGELLRALPRAYTISPSSVEDTMSLLECLGQIRSLLIVQMGPQEENLMIQSIGNIMNNKVFYQHPNLMRALGMHETVMEVMVNVLGGGESKEIRFPKMVTSCCRFLCYFCRISRQNQRSMFDHLSYLLENSGIGLGMQGSTPLDVAAASVIDNNELALALQEQDLEKVVSYLAGCGLQSCPMLVAKGYPDIGWNPCGGERYLDFLRFAVFVNGESVEENANVVVRLLIRKPECFGPALRGEGGSGLLAAIEEAIRISEDPARDGPGIRRDRRREHFGEEPPEENRVHLGHAIMSFYAALIDLLGRCAPEMHLIQAGKGEALRIRAILRSLVPLEDLVGIISLPLQIPTLGKDGALVQPKMSASFVPDHKASMVLFLDRVYGIENQDFLLHVLDVGFLPDMRAAASLDTATFSTTEMALAVNRYLCLAVLPLITKCAPLFAGTEHRAIMVDSMLHTVYRLSRGRSLTKAQRDVIEDCLMSLCRYIRPSMLQHLLRRLVFDVPILNEFAKMPLKLLTNHYERCWKYYCLPTGWANFGVTSEEELHLTRKLFWGIFDSLAHKKYDPELYRMAMPCLCAIAGALPPDYVDASYSSKAEKKATVDAEGNFDPRPVETLNVIIPEKLDSFINKFAEYTHEKWAFDKIQNNWSYGENIDEELKTHPMLRPYKTFSEKDKEIYRWPIKESLKAMIAWEWTIEKAREGEEEKTEKKKTRKISQSAQTYDPREGYNPQPPDLSAVTLSRELQAMAEQLAENYHNTWGRKKKQELEAKGGGTHPLLVPYDTLTAKEKARDREKAQELLKFLQMNGYAVTRGLKDMELDSSSIEKRFAFGFLQQLLRWMDISQEFIAHLEAVVSSGRVEKSPHEQEIKFFAKILLPLINQYFTNHCLYFLSTPAKVLGSGGHASNKEKEMITSLFCKLAALVRHRVSLFGTDAPAVVNCLHILARSLDARTVMKSGPEIVKAGLRSFFESASEDIEKMVENLRLGKVSQARTQVKGVGQNLTYTTVALLPVLTTLFQHIAQHQFGDDVILDDVQVSCYRTLCSIYSLGTTKNTYVEKLRPALGECLARLAAAMPVAFLEPQLNEYNACSVYTTKSPRERAILGLPNSVEEMCPDIPVLERLMADIGGLAESGARYTEMPHVIEITLPMLCSYLPRWWERGPEAPPSALPAGAPPPCTAVTSDHLNSLLGNILRIIVNNLGIDEASWMKRLAVFAQPIVSRARPELLQSHFIPTIGRLRKRAGKVVSEEEQLRLEAKAEAQEGELLVRDEFSVLCRDLYALYPLLIRYVDNNRAQWLTEPNPSAEELFRMVGEIFIYWSKSHNFKREEQNFVVQNEINNMSFLTADNKSKMAKAGDIQSGGSDQERTKKKRRGDRYSVQTSLIVATLKKMLPIGLNMCAPTDQDLITLAKTRYALKDTDEEVREFLHNNLHLQGKVEGSPSLRWQMALYRGVPGREEDADDPEKIVRRVQEVSAVLYYLDQTEHPYKSKKAVWHKLLSKQRRRAVVACFRMTPLYNLPTHRACNMFLESYKAAWILTEDHSFEDRMIDDLSKAGEQEEEEEEVEEKKPDPLHQLVLHFSRTALTEKSKLDEDYLYMAYADIMAKSCHLEEGGENGEAEEEVEVSFEEKQMEKQRLLYQQARLHTRGAAEMVLQMISACKGETGAMVSSTLKLGISILNGGNAEVQQKMLDYLKDKKEVGFFQSIQALMQTCSVLDLNAFERQNKAEGLGMVNEDGTVINRQNGEKVMADDEFTQDLFRFLQLLCEGHNNDFQNYLRTQTGNTTTINIIICTVDYLLRLQESISDFYWYYSGKDVIEEQGKRNFSKAMSVAKQVFNSLTEYIQGPCTGNQQSLAHSRLWDAVVGFLHVFAHMMMKLAQDSSQIELLKELLDLQKDMVVMLLSLLEGNVVNGMIARQMVDMLVESSSNVEMILKFFDMFLKLKDIVGSEAFQDYVTDPRGLISKKDFQKAMDSQKQFSGPEIQFLLSCSEADENEMINCEEFANRFQEPARDIGFNVAVLLTNLSEHVPHDPRLHNFLELAESILEYFRPYLGRIEIMGASRRIERIYFEISETNRAQWEMPQVKESKRQFIFDVVNEGGEAEKMELFVSFCEDTIFEMQIAAQISEPEGEPETDEDEGAGAAEAGAEGAEEGAAGLEGTAATAAAGATARVVAAAGRALRGLSYRSLRRRVRRLRRLTAREAATAVAALLWAAVTRAGAAGAGAAAGALGLLWGSLFGGGLVEGAKKVTVTELLAGMPDPTSDEVHGEQPAGPGGDADGEGASEGAGDAAEGAGDEEEAVHEAGPGGADGAVAVTDGGPFRPEGAGGLGDMGDTTPAEPPTPEGSPILKRKLGVDGVEEELPPEPEPEPEPELEPEKADAENGEKEEVPEPTPEPPKKQAPPSPPPKKEEAGGEFWGELEVQRVKFLNYLSRNFYTLRFLALFLAFAINFILLFYKVSDSPPGEDDMEGSAAGDVSGAGSGGSSGWGLGAGEEAEGDEDENMVYYFLEESTGYMEPALRCLSLLHTLVAFLCIIGYNCLKVPLVIFKREKELARKLEFDGLYITEQPEDDDVKGQWDRLVLNTPSFPSNYWDKFVKRKVLDKHGDIYGRERIAELLGMDLATLEITAHNERKPNPPPGLLTWLMSIDVKYQIWKFGVIFTDNSFLYLGWYMVMSLLGHYNNFFFAAHLLDIAMGVKTLRTILSSVTHNGKQLVMTVGLLAVVVYLYTVVAFNFFRKFYNKSEDEDEPDMKCDDMMTCYLFHMYVGVRAGGGIGDEIEDPAGDEYELYRVVFDITFFFFVIVILLAIIQGLIIDAFGELRDQQEQVKEDMETKCFICGIGSDYFDTTPHGFETHTLEEHNLANYMFFLMYLINKDETEHTGQESYVWKMYQERCWDFFPAGDCFRKQYEDQLS

SEQ ID NO: 5040 - protein, 623 aa, Homo Sapiens [sequence omitted]

SEQ ID NO: 5041 - protein, 493 aa, Homo Sapiens
MISSKPRLVVPYGLKTLLEGISRAVLKTNPSNINQFAAAYFQELTMYRGNTTMDIKDLVKQFHQIKVEKWSEGTTPQKKLECLKEPGKTSVESKVPTQMEKSTDTDEDNVTRTEYSDKTTQFPSVYAVPGTEQTEAVGGLSSKPATPKTTTPPSSPPPTAVSPEFAYVPADPAQLAAQMLGKVSSIHSDQSDVLMVDVATSMPVVIKEVPSSEAAEDVMVAAPLVCSGKVLEVQVVNQTSVHVDLGSQPKENEAEPSTASSVPLQDEQEPPAYDQAPEVTLQADIEVMSTVHISSVYNDVPVTEGVVYIEQLPEQIVIPFTDQVACLKENEQSKENEQSPRVSPKSVVEKTTSGMSKKSVESVKLAQLEENAKYSSVYMEAEATALLSDTSLKGQPEVPAQLLDAEGAIKIGSEKSLHLEVEITSIVSDNTGQEESGENSVPQEMEGKPVLSGEAAEAVHSGTSVKSSSGPFPPAPEGLTAPEIEPEGESTAE

SEQ ID NO: 5042 - protein, 976 aa, Homo Sapiens
MERRWPLGLGLVLLLCAPLPPGARAKEVTLMDTSKAQGELGWLLDPPKDGWSEQQQILNGTPLYMYQDCPMQGRRDTDHWLRSNWIYRGEEASRVHVELQFTVRDCKSFPGGAGPLGCKETFNLLYMESDQDVGIQLRRPLFQKVTTVAADQSFTIRDLASGSVKLNVERCSLGRLTRRGLYLAFHNPGACVALVSVRVFYQRCPETLNGLAQFPDTLPGPAGLVEVAGTCLPHARASPRPSGAPRMHCSPDGEWLVPVGRCHCEPGYEEGGSGEACVACPSGSYRMDMDTPHCLTCPQQSTAESEGATICTCESGHYRAPGEGPQVACTGPPSAPRNLSFSASGTQLSLRWEPPADTGGRQDVRYSVRCSQCQGTAQDGGPCQPCGVGVHFSPGARALTTPAVHVNGLEPYANYTFNVEAQNGVSGLGSSGHASTSVSISMGHAESLSGLSLRLVKKEPRQLELTWAGSRPRSPGANLTYELHVLNQDEERYQMVLEPRVLLTELQPDTTYIVRVRMLTPLGPGPFSPDHEFRTSPPVSRGLTGGEIVAVIFGLLLGAALLLGILVFRSRRAQRQRQQRQRDRATDVDREDKLWLKPYVDLQAYEDPAQGALDFTRELDPAWLMVDTVIGEGEFGEVYRGTLRLPSQDCKTVAIKTLKDTSPGGQWWNFLREATIMGQFSHPHILHLEGVVTKRKPIMIITEFMENGALDAFLREREDQLVPGQLVAMLQGIASGMNYLSNHNYVHRDLAARNILVNQNLCCKVSDFGLTRLLDDFDGTYETQGGKIPIRWTAPEAIAHRIFTTASDVWSFGIVMWEVLSFGDKPYGEMSNQEVMKSIEDGYRLPPPVDCPAPLYELMKNCWAYDRARRPHFQKLQAHLEQLLANPHSLRTIANFDPRVTLRLPSLSGSDGIPYRTVSEWLESIRMKRYILHFHSAGLDTMECVLELTAEDLTQMGITLPGHQKRILCSIQGFKD

SEQ ID NO: 5043 - protein, 104 aa, Homo Sapiens
MGQCRSANAEDAQEFSDVERAIETLIKNFHQYSVEGGKETLTPSELRDLVTQQLPHLMPSNCGLEEKIANLGSCNDSKLEFRSFWELIGEAAKSVKLERPVRGH

SEQ ID NO: 5044 - protein, 345 aa, Homo Sapiens
MISPVLILFSSFLCHVAIAGRTCPKPDDLPFSTVVPLKTFYEPGEEITYSCKPGYVSRGGMRKFICPLTGLWPINTLKCTPRVCPFAGILENGAVRYTTFEYPNTISFSCNTGFYLNGADSAKCTEEGKWSPELPVCAPIICPPPSIPTFATLRVYKPSAGNNSLYRDTAVFECLPQHAMFGNDTITCTTHGNWTKLPECREVKCPFPSRPDNGFVNYPAKPTLYYKDKATFGCHDGYSLDGPEEIECTKLGNWSAMPSCKASCKVPVKKATVVYQGERVKIQEKFKNGMLHGDKVSFFCKNKEKKCSYTEDAQCIDGTIEVPKCFKEHSSLAFWKTDASDVKPC

SEQ ID NO: 5045 - protein, 272 aa, Homo Sapiens
MKGKKGIVAASGSETEDEDSMDIPLDLSSSAGSGKRRRRGNLPKESVQILRDWLYEHRYNAYPSEQEKALLSQQTHLSTLQVCNWFINARRRLLPDMLRKDGKDPNQFTISRRGAKISETSSVESVMGIKNFMPALEETPFHSCTAGPNPTLGRPLSPKPSSPGSVLARPSVICHTTVTALKDVPFSLCQSVGVGQNTDIQQIAAKNFTDTSLMYPEDTCKSGPSTNTQSGLFNTPPPTPPDLNQDFSGFQLLVDVALKRAAEMELQAKLTA

SEQ ID NO: 5046 - protein, 840 aa, Homo Sapiens
MSVVGIDLGFQSCYVAVARAGGIETIANEYSDRCTPACISFGPKNRSIGAAAKSQVISNAKNTVQGFKRFHGRAFSDPFVEAEKSNLAYDIVQLPTGLTGIKVTYMEEERNFTTEQVTAMLLSKLKETAESVLKKPVVDCVVSVPCFYTDAERRSVMDATQIAGLNCLRLMNETTAVALAYGIYKQDLPALEEKPRNVVFVDMGHSAYQVSVCAFNRGKLKVLATAFDTTLGGRKFDEVLVNHFCEEFGKKYKLDIKSKIRALLRLSQECEKLKKLMSANASDLPLSIECFMNDVDVSGTMNRGKFLEMCNDLLARVEPPLRSVLEQTKLKKEDIYAVEIVGGATRIPAVKEKISKFFGKELSTTLNADEAVTRGCALQCAILSPAFKVREFSITDVVPYPISLRWNSPAEEGSSDCEVFSKNHAAPFSKVLTFYRKEPFTLEAYYSSPQDLPYPDPAIAQFSVQKVTPQSDGSSSKVKVKVRVNVHGIFSVSSASLVEVHKSEENEEPMETDQNAKEEEKMQVDQEEPHVEEQQQQTPAENKAESEEMETSQAGSKDKKMDQPPQAKKAKVKTSTVDLPIENQLLWQIDREMLNLYIENEGKMIMQDKLEKERNDAKNAVREYVYEMRDKLSGEYEKFVSEDGRNSFTLKLEDTENWLYEDGEDQPKQVYVDKLAELKNLGQPIKIRFQESEERPKLFEELGKQIQQYMKIISSFKNKEDQYDHLDAADMTKVEKSTNEAMEWMNNKLNLQNKQSLTMDPVVKSKEIEAKIKELTSTCSPIISKPKPKVEPPKEEQKNAEQNGPVDGQGDNPGPQAAEQGTDTAVPSDSDKKLPEMDID

SEQ ID NO: 5047 - protein, 1291 aa, Homo Sapiens
ARLSRWWVQDWTHGPIVRPPAAARTMWVNPEEVLLANALWITERANPYFILQRRKGHAGDGGGGGGLAGLLVGTLDVVLDSSARVAPYRILYQTPDSLVYWTIACGGSRKEITEHWEWLEQNLLQTLSIFENENDITTFVRGKIQGIIAEYNKINDVKEDDDTEKFKEAIVKFHRLFGMPEEEKLVNYYSCSYWKGKVPRQGWMYLSINHLCFYSFLMGREAKLVIRWVDITQLEKNATLLLPDVIKVSTRSSEHFFSVFLNINETFKLMEQLANIAMRQLLDNEGFEQDRSLPKLKRKSPKKVSALKRDLDARAKSERYRALFRLPKDEKLDGHTDCTLWTPFNKMHILGQMFVSTNYICFTSKEENLCSLIIPLREVTIVEKADSSSVLPSPLSISTRNRMTFLFANLKDRDFLVQRISDFLQQTTSKIYSDKEFAGSYNSSDDEVYSRPSSLVSSSPQRSTSSDADGERQFNLNGNSVPTATQTLMTMYRRRSPEEFNPKLAKEFLKEQAWKIHFAEYGQGICMYRTEKTRELVLKGIPESMRGELWLLLSGAINEKATHPGYYEDLVEKSMGKYNLATEEIERDLHRSLPEHPAFQNEMGIAALRRVLTAYAFRNPNIGYCQAMNIVTSVLLLYAKEEEAFWLLVALCERMLPDYYNTRVVGALVDQGVFEELARDYVPQLYDCMQDLGVISTISLSWFLTLFLSVMPFESAVVVVDCFFYEGIKVIFQLALAVLDANVDKLLNCKDDGEAMTVLGRYLDSVTNKDSTLPPIPHLHSLLSDDVEPYPEVDIFRLIRTSYEKFGTIRADLIEQMRFKQRLKVIQTLEDTTKRNVVRTIVTETSFTIDELEELYALFKAEHLTSCYWGGSSNALDRHDPSLPYLEQYRIDFEQFKGMFALLFPWACGTHSDVLASRLFQLLDENGDSLINFREFVSGLSAACHGDLTEKLKLLYKMHVLPEPSSDQDEPDSAFEATQYFFEDITPECTHVVGLDSRSKQGADDGFVTVSLKPDKGKRANSQENRNYLRLWTPENKSKSKNAKDLPKLNQGQFIELCKTMYNMFSEDPNEQELYHATAAVTSLLLEIGEVGKLFVAQPAKEGGSGGSGPSCHQGIPGVLFPKKGPGQPYVVESVEPLPASLAPDSEEHSLGGQMEDIKLEDSSPRDNGACSSMLISDDDTKDDSSMSSYSVLSAGSHEEDKLHCEDIGEDTVLVRSGQGTAALPRSTSLDRDWAITFEQFLASLLTEPALVKYFDKPVCMMARITSAKNIRMMGKPLTSASDYEISAMSG

SEQ ID NO: 5048 - protein, 210 aa, Homo Sapiens
MRCLTTPMLLRALAQAARAGPPGGRSLHSSAVAATYKYVNMQDPEMDMKSVTDRAARTLLWTELFRGLGMTLSYLFREPATINYPFEKGPLSPRFRGEHALRRYPSGEERCIACKLCEAICPAQAITIEAEPRADGSRRTTRYDIDMTKCIYCGFCQEACPVDAIVEGPNFEFSTETHEELLYNKEKLLNNGDKWEAEIAANIQADYLYR

SEQ ID NO: 5049 - protein, 262 aa, Homo Sapiens
MRNSYRFLASSLSVVVSLLLIPEDVCEKIIGGNEVTPHSRPYMVLLSLDRKTICAGALIAKDWVLTAAHCNLNKRSQVILGAHSITREEPTKQIMLVKKEFPYPCYDPATREGDLKLLQLTEKAKINKYVTILHLPKKGDDVKPGTMCQVAGWGRTHNSASWSDTLREVNITIIDRKVCNDRNHYNFNPVIGMNMVCAGSLRGGRDSCNGDSGSPLLCEGVFRGVTSFGLENKCGDPRGPGVYILLSKKHLNWIIMTIKGAV

SEQ ID NO: 5050 - protein, 242 aa, Homo Sapiens
MAETEALSKLREDFRMQNKSVFILGASGETGRVLLKEILEQGLFSKVTLIGRRKLTFDEEAYKNVNQEVVDFEKLDDYASAFQGHDVGFCCLGTTRGKAGAEGFVRVDRDYVLKSAELAKAGGCKHFNLLSSKGADKSSNFLYLQVKGEVEAKVEELKFDRYSVFRPGVLLCDRQESRPGEWLVRKFFGSLPDSWARGHSVPVVTVVRAMLNNVVRPRDKQMELLENKAIHDLGKAHGSLKP

SEQ ID NO: 5051 - protein, 466 aa, Homo Sapiens
MVRSVAWAGFMVLLMIPWGSAAKLVCYFTNWAQYRQGEARFLPKDLDPSLCTHLIYAFAGMTNHQLSTTEWNDETLYQEFNGLKKMNPKLKTLLAIGGWNFGTQKFTDMVATANNRQTFVNSAIRFLRKYSFDGLDLDWEYPGSQGSPAVDKERFTTLVQDLANAFQQEAQTSGKERLLLSAAVPAGQTYVDAGYEVDKIAQNLDFVNLMAYDFHGSWEKVTGHNSPLYKRQEESGAAASLNVDAAVQQWLQKGTPASKLILGMPTYGRSFTLASSSDTRVGAPATGSGTPGPFTKEGGMLAYYEVCSWKGATKQRIQDQKVPYIFRDNQWVGFDDVESFKTKVSYLKQKGLGGAMVWALDLDDFAGFSCNQGRYPLIQTLRQELSLPYLPSGTPELEVPKPGQPSEPEHGPSPGQDTFCQGKADGLYPNPRERSSFYSCAAGRLFQQSCPTGLVFSNSCKCCTWN

SEQ ID NO: 5052 - protein, 1001 aa, Homo Sapiens
MIFPVARYALRWLRRPEDRAFSRAAMEMALRGVRKVLCVAEKNDAAKGIADLLSNGRMRRREGLSKFNKIYEFDYHLYGQNVTMVMTSVSGHLLAHDFQMQFRKWQSCNPLVLFEAEIEKYCPENFVDIKKTLERETRQCQALVIWTDCDREGENIGFEIIHVCKAVKPNLQVLRARFSEITPHAVRTACENLTEPDQRVSDAVDVRQELDLRIGAAFTRFQTLRLQRIFPEVLAEQLISYGSCQFPTLGFVVERFKAIQAFVPEIFHRIKVTHDHKDGIVEFNWKRHRLFNHTACLVLYQLCVEDPMATVVEVRSKPKSKWRPQALDTVELEKLASRKLRINAKETMRIAEKLYTQGYISYPRTETNIFPRDLNLTVLVEQQTPDPRWGAFAQSILERGGPTPRNGNKSDQAHPPIHPTKYTNNLQGDEQRLYEFIVRHFLACCSQDAQGQETTVEIDIAQERFVAHGLMILARNYLDVYPYDHWSDKILPVYEQGSHFQPSTVEMVDGETSPPKLLTEADLIALMEKHGIGTDATHAEHIETIKARMYVGLTPDKRFLPGHLGMGLVEGYDSMGYEMSKPDLRAELEADLKLICDGKKDKFVVLRQQVQKYKQVFIEAVAKAKKLDEALAQYFGNGTELAQQEDIYPAMPEPIRKCPQCNKDMVLKTKKNGGFYLSCMGFPECRSAVWLPDSVLEASRDSSVCPVCQPHPVYRLKLKFKRGSLPPTMPLEFVCCIGGCDDTLREILDLRFSGGPPRASQPSGRLQANQSLNRMDNSQHPQPADSRQTGSSKALAQTLPPPTAAGESNSVTCNCGQEAVLLTVRKEGPNRGRQFFKCNGGSCNFFLWADSPNPGAGGPPALAYRPLGASLGCPPGPGIHLGGFGNPGDGSGSGTSCLCSQPSVTRTVQKDGPNKGRQFHTCAKPREQQCGFFQWVDENTAPGTSGAPSWTGDRGRTLESEARSKRPRASSSDMGSTAKKPRKCSLCHQPGHTRPFCPQNR

SEQ ID NO: 5053 - protein, 976 aa, Homo Sapiens
MNAGPGCEPCTKATRWGAATTSPAASDARSFPSRQRRVLDPKDAHVQFRVPPSSPACVPGQAGQHRGSATSLVFKQKTITSWMDTKGIKTAESESLDSKENNNTRIESMMSSVQKDNFYQHNVEKLVNVSQLSLDKSLTEKSTQYLNQHQTAAMCKWQNEGKHTEQLLESEPQTVTLVPEQFSNANIDRSPQNDDHSDTDSEENRDNQQFLTTVKLANAKQTTEDEHAREAKSHQKCSKSCHPGEDCASCQQDEIDVVPKSPLSDVGSEDVGTGSKNDNKLIRQESCLGNSPPFEKESEPESPMDVDNSKNSCQDSEADEETSPGFDEQEDGSSSQTANKPSRFQARDADIEFRKRYSTKGGEVRLHFQFEGGESRTGMNDLNAKLPGNISSLNVECRNSKQHGKKDSKITDHLMRLPKAEDRRKEQWETKHQRTERKIPKYVPPHLSPDKKWLGTPIEEMRRMPRCGIRLPLLRPSANHTVTIRVDLLRAGEVPKPFPTHYKDLWDNKHVKMPCSEQNLYPVEDENGERTAGSRWELIQTALLNKFTRPQNLKDAILKYNVAYSKKWDFTALIDFWDKVLEEAEAQHLYQSILPDMVKIALCLPNICTQPIPLLKQKMNHSITMSQEQIASLLANAFFCTFPRRNAKMKSEYSSYPDINFNRLFEGRSSRKPEKLKTLFCYFRRVTEKKPTGLVTFTRQSLEDFPEWERCEKPLTRLHVTYEGTIEENGQGMLQVDFANRFVGGGVTSAGLVQEEIRFLINPELIISRLFTEVLDHNECLIITGTEQYSEYTGYAETYRWSRSHEDGSERDDCERRCTEIVAIDALHFRRYLDQFVPEKMRRELNKAYCGFLRPGVSSENLSAVATGNWGCGAFGGDARLKALIQILAAAAAERDVVYFTFGDSELMRDIYSMHIFLTERKLTVGDVYKLLLRYYNEECRNCSTPGPDIKLYPFIYHAVESCAETADHSGQRTGT

SEQ ID NO: 5054 - protein, 36 aa, Homo Sapiens
MYQHFIINYSFLVLCLSCFRTFSQVKSFLVLKLLVS

SEQ ID NO: 5055 - protein, 471 aa, Homo Sapiens
MIDLSFLTEEEQEAIMKVLQRDAALKRAEEERVRHLPEKIKDDQQLKNMSGQWFYEAKAKRHRDKIHGADIIRASMRKKRPQIAAEQSKDRENGAKESWVNNVNKDAFLPPELAGVVEEPEEDAAPASPSSSVVNPASSVIDMSQENTRKPNVSPEKRKNPFNSSKLPEGHSSQQTKNEQSKNGRTGLFQTSKEDELSESKEKSTVADTSIQKLEKSKQTLPGLSNGSQIKAPIPKARKMIYKSTDLNKDDNQSFPRQRTDSLKARGAPRGILKRNSSSSSTDSETLRYNHNFEPKSKIVSPGLTIHERISEKEHSLEDNSSPNSLEPLKHVRFSAVKDELPQSPGLIHGREVGEFSVLESDRLKNGMEDAGDTEEFQSDPKPSQYRKPSLFHQSTSSPYVSKSETHQPMTSGSFPINGLHSHSEVLTARPQSMENSPTINEPKDKSSELTRLESVLPRSPAGKRVVTTRL

SEQ ID NO: 5056 - protein, 179 aa, Homo Sapiens
MASQNRDPAATSVAAARKGAEPSGGAARGPVGKRLQQELMTLMMSGDKGISAFPESDNLFKWVGTIHGAAGTVYEDLRYKLSLEFPSGYPYNAPTVKFLTPCYHPNVDTQGNICLDILKEKWSALYDVRTILLSIQSLLGEPNIDSPLNTHAAELWKNPTAFKKYLQETYSKQVTSQEP

SEQ ID NO: 5057 - protein, 439 aa, Homo Sapiens
MPAIAVLAAAAAAWCFLQVESRHLDALAGGAGPNHGNFLDNDQWLSTVSQYDRDKYWNRFRDDDYFRNWNPNKPFDQALDPSKDPCLKVKCSPHKVCVTQDYQTALCVSRKHLLPRQKKGNVAQKHWVGPSNLVKCKPCPVAQSAMVCGSDGHSYTSKCKLEFHACSTGKSLATLCDGPCPCLPEPEPPKHKAERSACTDKELRNLASRLKDWFGALHEDANRVIKPTSSNTAQGRFDTSILPICKDSLGWMFNKLDMNYDLLLDPSEINAIYLDKYEPCIKPLFNSCDSFKDGKLSNNEWCYCFQKPGGLPCQNEMNRIQKLSKGKSLLGAFIPRCNEEGYYKATQCHGSTGQCWCVDKYGNELAGSRKQGAVSCEEEQETSGDFGSGGSVVLLDDLEYERELGPKDKEGKLRVHTRAVTEDDEDEDDDKEDEVGYIW

SEQ ID NO: 5058 - protein, 246 aa, Homo Sapiens
MNDWMPIAKEYDPLKAGSIDGTDEDPHDRAVWRAMLARYVPNKGVIGDPLLTLFVARLNLQTKEDKLKEVFSRYGDIRRLRLVRDLVTGFSKGYAFIEYKEERAVIKAYRDADGLVIDQHEIFVDYELERTLKGWIPRRLGGGLGGKKESGQLRFGGRDRPFRKPINLPVVKNDLYREGKRERRERSRSRERHWDSRTRDRDHDRGREKRWQEREPTRVWPDNDWERERDFRDDRIKGREKKERGK

SEQ ID NO: 5059 - protein, 346 aa, Homo Sapiens
MDMLDPGLDPAASATAAAAASHDKGPEAEEGVELQEGGDGPGAEEQTAVAITSVQQAAFGDHNIQYQFRTETNGGQVTYRVVQVTDGQLDGQGDTAGAVSVVSTAAFAGGQQAVTQVGVDGAAQRPGPAAASVPPGPAAPFPLAVIQNPFSNGGSPAAEAVSGEARFAYFPASSVGDTTAVSVQTTDQSLQAGGQFYVMMTPQDVLQTGTQRTIAPRTHPYSPKIDGTRTPRDERRRAQHNEVERRRRDKINNWIVQLSKIIPDCNADNSKTGASKGGILSKACDYIRELRQTNQRMQETFKEAERLQMDNELLRQQIEELKNENALLRAQLQQHNLEMVGEGTRQ

SEQ ID NO: 5060 - protein, 530 aa, Homo Sapiens
MSRSPQRALPPGALPRLLQAAPAAAPRALLPQWPRRPGRRWPASPLGMKVFRRKALVLCAGYALLLVLTMLNLLDYKWHKEPLQQCNPDGPLGAAAGAAGGSWGRPGPPPAGPPRAHARLDLRTPYRPPAAAVGAAPAAAAGMAGVAAPPGNGTRGTGGVGDKRQLVYVFTTWRSGSSFFGELFNQNPEVFFLYEPVWHVWQKLYPGDAVSLQGAARDMLSALYRCDLSVFQLYSPAGSGGRNLTTLGIFGAATNKVVCSSPLCPAYRKEVVGLVDDRVCKKCPPQRLARFEEECRKYRTLVIKGVRVFDVAVLAPLLRDPALDLKVIHLVRDPRAVASSRIRSRHGLIRESLQVVRSRDPRAHRMPFLEAAGHKLGAKKEGVGGPADYHALGAMEVICNSMAKTLQTALQPPDWLQGHYLVVRYEDLVGDPVKTLRRVYDFVGLLVSPEMEQFALNMTSGSGSSSKPFVVSARNATQAANAWRTALTFQQIKQVEEFCYQPMAVLGYERVNSPEEVKDLSKTLLRKPRL

SEQ ID NO: 5061 - protein, 350 aa, Homo Sapiens
MASPPPFHSQKLPGEYFRYKGVPFPVGLYSLESISLAENTQDVRDDDIFIITYPKSGTTWMIEIICLILKEGDPSWIRSVPIWERAPWCETIVGAFSLPDQYSPRLMSSHLPIQIFTKAFFSSKAKVIYMGRNPRDVVVSLYHYSKIAGQLKDPGTPDQFLRDFLKGEVQFGSWFDHIKGWLRMKGKDNFLFITYEELQQDLQGSVERICGFLGRPLGKEALGSVVAHSTFSAMKANTMSNYTLLPPSLLDHRRGAFLRKGVCGDWKNHFTVAQSEAFDRAYRKQMRGMPTFPWDEDPEEDGSPDPEPSPEPEPKPSLEPNTSLEREPRPNSSPSPSPGQASETPHPRPS

SEQ ID NO: 5062 - protein, 202 aa, Homo Sapiens
MLPPGTATLLTLLLAAGSLGQKPQRPRRPASPISTIQPKANFDAQQFAGTWLLVAVGSACRFLQEQGHRAEATTLHVAPQGTAMAVSTFRKLDGICWQVRQLYGDTGVLGRFLLQARGARGAVHVVVAETDYQSFAVLYLERAGQLSVKLYARSLPVSDSVLSGFEQRVQEAHLTEDQIFYFPKYGFCEAADQFHVLDEVRR

SEQ ID NO: 5063 - protein, 1771 aa, Homo Sapiens
MMERAIIDTFVGHDVVEPGSYVQMFPYPCYTRDDFLFVIEHMMPLCMVISWVYSVAMTIQHIVAEKEHRLKEVMKTMGLNNAVHWVAWFITGFVQLSISVTALTAILKYGQVLMHSHVVIIWLFLAVYAVATIMFCFLVSVLYSKAKLASACGGIIYFLSYVPYMYVAIREEVAHDKITAFEKCIASLMSTTAFGLGSKYFALYEVAGVGIQWHTFSQSPVEGDDFNLLLAVTMLMVDAVVYGILTWYIEAVHPGMYGLPRPWYFPLQKSYWLGSGRTEAWEWSWPWARTPRLSVMEEDQACAMESRRFEETRGMEEEPTHLPLVVCVDKLTKVYKDDKKLALNKLSLNLYENQVVSFLGHNGAGKTTTMSILTGLFPPTSGSATIYGHDIRTEMDEIRKNLGMCPQHNVLFDRLTVEEHLWFYSRLKSMAQEEIRREMDKMIEDLELSNKRHSLVQTLSGGMKRKLSVAIAFVGGSRAIILDEPTAGVDPYARRAIWDLILKYKPGRTILLSTHHMDEADLLGDRIAIISHGKLKCCGSPLFLKGTYGDGYRLTLVKRPAEPGGPQEPGLASSPPGRAPLSSCSELQVSQFIRKHVASCLLVSDTSTELSYILPSEAAKKGAFERLFQHLERSLDALHLSSFGLMDTTLEEVFLKVSEEDQSLENSEADVKESRKDVLPGAEGPASGEGHAGNLARCSELTQSQASLQSASSVGSARGDEGAGYTDVYGDYRPLFDNPQDPDNVSLQEVEAEALSRVGQGSRKLDGGWLKVRQFHGLLVKRFHCARRNSKALFSQILLPAFFVCVAMTVALSVPEIGDLPPLVLSPSQYHNYTQPRGNFIPYANEERREYRLRLSPDASPQQLVSTFRLPSGVGATCVLKSPANGSLGPTLNLSSGESRLLAARFFDSMCLESFTQGLPLSNFVPPPPSPAPSDSPASPDEDLQAWNVSLPPTAGPEMWTSAPSLPRLVREPVRCTCSAQGTGFSCPSSVGGHPPQMRVVTGDILTDITGHNVSEYLLFTSDRFRLHRYGAITFGNVLKSIPASFGTRAPPMVRKIAVRRAAQVFYNNKGYHSMPTYLNSLNNAILRANLPKSKGNPAAYGITVTNHPMNKTSASLSLDYLLQGTDVVIAIFIIVAMSFVPASFVVFLVAEKSTKAKHLQFVSGCNPIIYWLANYVWDMLNYLVPATCCVIILFVFDLPAYTSPTNFPAVLSLFLLYGWSITPIMYPASFWFEVPSSAYVFLIVINLFIGITATVATFLLQLFEHDKDLKVVNSYLKSCFLIFPNYNLGHGLMEMAYNEYINEYYAKIGQFDKMKSPFEWDIVTRGLVAMAVEGVVGFLLTIMCQYNFLRRPQRMPVSTKPVEDDVDVASERQRVLRGDADNDMVKIENLTKVYKSRKIGRILAVDRLCLGVRPGECFGLLGVNGAGKTSTFKMLTGDESTTGGEAFVNGHSVLKELLQVQQSLGYCPQCDALFDELTAREHLQLYTRLRGISWKDEARVVKWALEKLELTKYADKPAGTYSGGNKRKLSTAIALIGYPAFIFLDEPTTGMDPKARRFLWNLILDLIKTGRSVVLTSHSMEECEALCTRLAIMVNGRLRCLGSIQHLKNRFGDGYMITVRTKSSQSVKDVVRFFNRNFPEAMLKERHHTKVQYQLKSEHISLAQVFSKMEQVSGVLGIEDYSVSQTTLDNVFVNFAKKQSDNLEQQETEPPSALQSPLGCLLSLLRPRSAPTELRALVADEPEDLDTEDEGLISFEEERAQLSFNTDTLC

SEQ ID NO: 5064 - protein, 413 aa, Homo Sapiens
MAEGPEEARGHPPGQDDGGGDHEPVPSLRGPPTTAVPCPRDDPQAEPQAPGRPTAPGLAAAAAADKLEPPRELRKRGEAASGSGAELQEQAGCEAPEAAAPRERPARLSAREYSRQVHEWLWQSYCGYLTWHSGLAAFPAYCSPQPSPQSFPSGGAAVPQAAAPPPPQLGYYNPFYFLSPGAAGPDPRTAAGISTPAPVAGLGPRAPHVQASVRATPVTRVGSAAPSRSPSETGRQAGREYVIPSLAHRFMAEMVDFFILFFIKATIVLSIMHLSGIKDISKFAMHYIIEEIDEDTSMEDLQKMMVVALIYRLLVCFYEIICIWGAGGATPGKFLLGLRVVTCDTSVLIAPSRVLVIPSSNVSITTSTIRALIKNFSIASFFPAFITLLFFQHNRTAYDIVAGTIVVKRNGVR

SEQ ID NO: 5065 - protein, 1076 aa, Homo Sapiens
MEPGSKSVSRSDWQPEPHQRPITPLEPGPEKTPIAQPESKTLQGSNTQQKPASNQRPLTQQETPAQHDAESQKEPRAQQKSASQEEFLAPQKPAPQQSPYIQRVLLTQQEAASQQGPGLGKESITQQEPALRQRHVAQPGPGPGEPPPAQQEAESTPAAQAKPGAKREPSAPTESTSQETPEQSDKQTTPVQGAKSKQGSLTELGFLTKLQELSIQRSALEWKALSEWVTDSESESDVGSSSDTDSPATMGGMVAQGVKLGFKGKSGYKVMSGYSGTSPHEKTSARNHRHYQDTASRLIHNMDLRTMTQSLVTLAEDNIAFFSSQGPGETAQRLSGVFAGVREQALGLEPALGRLLGVAHLFDLDPETPANGYRSLVHTARCCLAHLLHKSRYVASNRRSIFFRTSHNLAELEAYLAALTQLRALVYYAQRLLVTNRPGVLFFEGDEGLTADFLREYVTLHKGCFYGRCLGFQFTPAIRPFLQTISIGLVSFGEHYKRNETGLSVAASSLFTSGRFAIDPELRGAEFERITQNLDVHFWKAFWNITEMEVLSSLANMASATVRVSRLLSLPPEAFEMPLTADPTLTVTISPPLAHTGPGPVLVRLISYDLREGQDSEELSSLIKSNGQRSLELWPRPQQAPRSRSLIVHFHGGGFVAQTSRSHEPYLKSWAQELGAPIISIDYSLAPEAPFPRALEECFFAYCWAIKHCALLGSTGERICLAGDSAGGNLCFTVALRAAAYGVRVPDGIMAAYPATMLQPAASPSRLLSLMDPLLPLSVLSKCVSAYAGAKTEDHSNSDQKALGMMGLVRRDTALLLRDFRLGASSWLNSFLELSGRKSQKMSEPIAEPMRRSVSEAALAQPQGPLGTDSLKNLTLRDLSLRGNSETSSDTPEMSLSAETLSPSTPSDVNFLLPPEDAGEEAEAKNELSPMDRGLGVRAAFPEGFHPRRSSQGATQMPLYSSPIVKNPFMSPLLAPDSMLKSLPPVHIVACALDPMLDDSVMLARRLRNLGQPVTLRVVEDLPHGFLTLAALCRETRQAAELCVERIRLVLTPPAGAGPSGETGAAGVDGGCGGRH

SEQ ID NO: 5066 - protein, 601 aa, Homo Sapiens
MALLAGGLSRGLGSHPAAAGRDAVVFVWLLLSTWCTAPARAIQVTVSNPYHVVILFQPVTLPCTYQMTSTPTQPIVIWKYKSFCRDRIADAFSPASVDNQLNAQLAAGNPGYNPYVECQDSVRTVRVVATKQGNAVTLGDYYQGRRITITGNADLTFDQTAWGDSGVYYCSVVSAQDLQGNNEAYAELIVLGRTSGVAELLPGFQAGPIEDWLFVVVVCLAAFLIFLLLGICWCQCCPHTCCCYVRCPCCPDKCCCPEALYAAGKAATSGVPSIYAPSTYAHLSPAKTPPPPAMIPMGPAYNGYPGGYPGDVDRSSSAGGQGSYVPLLRDTDSSVASEVRSGYRIQASQQDDSMRVLYYMEKELANFDPSRPGPPSGRVERAMSEVTSLHEDDWRSRPSRGPALTPIRDEEWGGHSPRSPRGWDQEPAREQAGGGWRARRPRARSVDALDDLTPPSTAESGSRSPTSNGGRSRAYMPPRSRSRDDLYDQDDSRDFPRSRDPHYDDFRSRERPPADPRSHHHRTRDPRDNGSRSGDLPYDGRLLEEAVRKKGSEERRRPHKEEEEEAYYPPAPPPYSETDSQASRERRLKKNLALSRESLVV

SEQ ID NO: 5067 - protein, 481 aa, Homo Sapiens
MEGPGLGSQCRNHSHGPHPPGFGRYGICAHENKELANAREALPLIEDSSNCDIVKATQYGIFERCKELVEAGYDVRQPDKENVSLLHWAAINNRLDLVRFYISKGAVVDQLGGDLNSTPLHWAIRQGHLPMVILLLQHGADPTLIDGEGFSSIHLAVLFQHMPIIAYLISKGQSVNMTDVNGQTPLMLSAHKVIGPEPTGFLLKFNPSLNVVDKIHQNTPLHWAVAAGNVNAVDKLLEAGSSLDIQNVKGETPLDMALQNKNQLIIHMLKTEAKMRANQKFRLWRWLQKCELFLLLMLSVITMWAIGYILDFNSDSWLLKGCLLVTLFFLTSLFPRFLVGYKNLVYLPTAFLLSSVFWIFMTWFILFFPDLAGAPFYFSFIFSIVAFLYFFYKTWATDPGFTKASEEEKKVNIITLAETGSLDFRTFCTSCLIRKPLRSLHCHVCNCCVARYDQHCLWTGRCIGFGNHHYYIFFLFFLSMV

SEQ ID NO: 5068 - protein, 556 aa, Homo Sapiens [sequence omitted]

SEQ ID NO: 5069 - protein, 553 aa, Homo Sapiens
MQARYSVSSPNSLGVVPYLGGEQSYYRAAAAAAGGGYTAMPAPMSVYSHPAHAEQYPGGMARAYGPYTPQPQPKDMVKPPYSYIALITMAIQNAPDKKITLNGIYQFIMDRFPFYRDNKQGWQNSIRHNLSLNECFVKVPRDDKKPGKGSYWTLDPDSYNMFENGSFLRRRRRFKKKDAVKDKEEKDRLHLKEPPPPGRQPPPAPPEQADGNAPGPQPPPVRIQDIKTENGTCPSPPQPLSPAAALGSGSAAAVPKIESPDSSSSSLSSGSSPPGSLPSARPLSLDGADSAPPPPAPSAPPPHHSQGFSVDNIMTSLRGSPQSAAAELSSGLLASAAASSRAGIAPPLALGAYSPGQSSLYSSPCSQTSSAGSSGGGGGGAGAAGGAGGAGTYHCNLQAMSLYAAGERGGHLQGAPGGAGGSAVDDPLPDYSLPPVTSSSSSSLSHGGGGGGGGGGQEAGHHPAAHQGRLTSWYLNQAGGDLGHLASAAAAAAAAGYPGQQQNFHSVREMFESQRIGLNNSPVNGNSSCQMAFPSSQSLYRTSGAFVYDCSKF

SEQ ID NO: 5070 - protein, 750 aa, Homo Sapiens
MGKSESQMDITDINTPKPKKKQRWTRLEISLSVLVLLLTIIAVRMIALYATYDDGICKSSDCIKSAARLIQNMDATTEPCRDFFKYACGGWLKRNVIPETSSRYGNFDILRDELEVVLKDVLQEPKTEDIVAVQKAKALYRSCINESAIDSRGGEPLLKLLPDIYGWPVATENWEQKYGASWTAEKAIAQLNSKYGKKVLINLFVGTDDKNSVNHVIHIDQPRLGLPSRDYYECTGIYKEACTAYVDFMISVARLIRQEERLPIDENQLALEMNKVMELEKEIANATAKPEDRNDPMLLYNKMRLAQIQNNFSLEINGKPFSWLNFTNEIMSTVNISITNEEDVVVYAPEYLTKLKPILTKYSARDLQNLMSWRFIMDLVSSLSRTYKESRNAFRKALYGTTSETATWRRCANYVNGNMENAVGRLYVEAAFAGESKHVVEDLIAQIREVFIQTLDDLTWMDAETKKRAEEKALAIKERIGYPDDIVSNDNKLNNEYLELNYKEDEYFENIIQNLKFSQSKQLKKLREKVDKDEWISGAAVVNAFYSSGRNQIVFPAGILQPPFFSAQQSNSLNYGGIGMVIGHEITHGFDDNGRNFNKDGDLVDWWTQQSASNFKEQSQCMVYQYGNFSWDLAGGQHLNGINTLGENIADNGGLGQAYRAYQNYIKKNGEEKLLPGLDLNHKQLFFLNFAQVWCGTYRPEYAVNSIKTDVHSPGNFRIIGTLQNSAEFSEAFHCRKNSYMNPEKKCRVW

SEQ ID NO: 5071 - protein, 784 aa, Homo Sapiens
MQRLMMLLATSGACLGLLAVAAVAAAGANPAQRDTHSLLPTHRRQKRDWIWNQMHIDEEKNTSLPHHVGKIKSSVSRKNAKYLLKGEYVGKVFRVDAETGDVFAIERLDRENISEYHLTAVIVDKDTGENLETPSSFTIKVHDVNDNWPVFTHRLFNASVPESSAVGTSVISVTAVDADDPTVGDHASVMYQILKGKEYFAIDNSGRIITITKSLDREKQARYEIVVEARDAQGLRGDSGTATVLVTLQDINDNFPFFTQTKYTFVVPEDTRVGTSVGSLFVEDPDEPQNRMTKYSILRGDYQDAFTIETNPAHNEGIIKPMKPLDYEYIQQYSFIVEATDPTIDLRYMSPPAGNRAQVIINITDVDEPPIFQQPFYHFQLKENQKKPLIGTVLAMDPDAARHSIGYSIRRTSDKGQFFRVTKKGDIYNEKELDREVYPWYNLTVEAKELDSTGTPTGKESIVQVHIEVLDENDNAPEFAKPYQPKVCENAVHGQLVLQISAIDKDITPRNVKFKFILNTENNFTLTDNHDNTANITVKYGQFDREHTKVHFLPVVISDNGMPSRTGTSTLTVAVCKCNEQGEFTFCEDMAAQVGVSIQAVVAILLCILTITVITLLIFLRRRLRKQARAHGKSVPEIHEQLVTYDEEGGGEMDTTSYDVSVLNSVRRGGAKPPRPALDARPSLYAQVQKPPRHAPGAHGGPGEMAAMIEVKKDEADHDGDGPPYDTLHIYGYEGSESIAESLSSLGTDSSDSDVDYDFLNDWGPRFKMLAELYGSDPREELLY

SEQ ID NO: 5072 - protein, 2510 aa, Homo Sapiens
MARFGDEMPARYGGGGSGAAAGVVVGSGGGRGAGGSRQGGQPGAQRMYKQSMAQRARTMALYNPIPVRQNCLTVNRSLFLFSEDNVVRKYAKKITEWPPFEYMILATIIANCIVLALEQHLPDDDKTPMSERLDDTEPYFIGIFCFEAGIKIIALGFAFHKGSYLRNGWNVMDFVVVLTGILATVGTEFDLRTLRAVRVLRPLKLVSGIPSLQVVLKSIMKAMIPLLQIGLLLFFAILIFAIIGLEFYMGKFHTTCFEEGTDDIQGESPAPCGTEEPARTCPNGTKCQPYWEGPNNGITQFDNILFAVLTVFQCITMEGWTDLLYNSNDASGNTWNWLYFIPLIIIGSFFMLNLVLGVLSGEFAKERERVENRRAFLKLRRQQQIERELNGYMEWISKAEEVILAEDETDGEQRHPFDGALRRTTIKKSKTDLLNPEEAEDQLADIASVGSPFARASIKSAKLENSTFFHKKERRMRFYIRRMVKTQAFYWTVLSLVALNTLCVAIVHYNQPEWLSDFLYYAEFIFLGLFMSEMFIKMYGLGTRPYFHSSFNCFDCGVIIGSIFEVIWAVIKPGTSFGISVLRALRLLRIFKVTKYWASLRNLVVSLLNSMKSIISLLFLLFLFIVVFALLGMQLFGGQFNFDEGTPPTNFDTFPAAIMTVFQILTGEDWNEVMYDGIKSQGGVQGGMVFSIYFIVLTLFGNYTLLNVFLAIAVDNLANAQELTKVEADEQEEEEAANQKLALQKAKEVAEVSPLSAANMSIAVKEQQKNQKPAKSVWEQRTSEMRKQNLLASREALYNEMDPDERWKAAYTRHLRPDMKTHLDRPLVVDPQENRNNNTNKSRAAEPTVDQRLGQQRAEDFLRKQARYHDRARDPSGSAGLDARRPWAGSQEAELSREGPYGRESDHHAREGSLEQPGFWEGEAERGKAGDPHRRHVHRQGGSRESRSGSPRTGADGEHRRHRAHRRPGEEGPEDKAERRARHREGSRPARGGEGEGEGPDGGERRRRHRHGAPATYEGDARREDKERRHRRRKENQGSGVPVSGPNLSTTRPIQQDLGRQDPPLAEDIDNMKNNKLATAESAAPHGSLGHAGLPQSPAKMGNSTDPGPMLAIPAMATNPQNAASRRTPNNPGNPSNPGPPKTPENSLIVTNPSGTQTNSAKTARKPDHTTVDIPPACPPPLNHTVVQVNKNANPDPLPKKEEEKKEEEEDDRGEDGPKPMPPYSSMFILSTTNPLRRLCHYILNLRYFEMCILMVIAMSSIALAAEDPVQPNAPRNNVLRYFDYVFTGVFTFEMVIKMIDLGLVLHQGAYFRDLWNILDFIVVSGALVAFAFTGNSKGKDINTIKSLRVLRVLRPLKTIKRLPKLKAVFDCVVNSLKNVFNILIVYMLFMFIFAVVAVQLFKGKFFHCTDESKEFEKDCRGKYLLYEKNEVKARDREWKKYEFHYDNVLWALLTLFTVSTGEGWPQVLKHSVDATFENQGPSPGYRMEMSIFYVVYFVVFPFFFVNIFVALIIITFQEQGDKMMEEYSLEKNERACIDFAISAKPLTRHMPQNKQSFQYRMWQFVVSPPFEYTIMAMIALNTIVLMMKFYGASVAYENALRVFNIVFTSLFSLECVLKVMAFGILNYFRDAWNIFDFVTVLGSITDILVTEFGNPNNFINLSFLRLFRAARLIKLLRQGYTIRILLWTFVQSFKALPYVCLLIAMLFFIYAIIGMQVFGNIGIDVEDEDSDEDEFQITEHNNFRTFFQALMLLFRSATGEAWHNIMLSCLSGKPCDKNSGILTRECGNEFAYFYFVSFIFLCSFLMLNLFVAVIMDNFEYLTRDSSILGPHHLDEYVRVWAEYDPAAWGRMPYLDMYQMLRHMSPPLGLGKKCPARVAYKRLLRMDLPVADDNTVHFNSTLMALIRTALDIKIAKGGADKQQMDAELRKEMMAIWPNLSQKTLDLLVTPHKSTDLTVGKIYAAMMIMEYYRQSKAKKLQAMREEQDRTPLMFQRMEPPSPTQEGGPGQNALPSTQLDPGGALMAHESGLKESPSWVTQRAQEMFQKTGTWSPEQGPPTDMPNSQPNSQSVEMREMGRDGYSDSEHYLPMEGQGRAASMPRLPAENQRRRGRPRGNNLSTISDTSPMKRSASVLGPKARRLDDYSLERVPPEENQRHHQRRRDRSHRASERSLGRYTDVDTGLGTDLSMTTQSGDLPSKERDQERGRPKDRKHRQHHHHHHHHHHPPPPDKDRYAQERPDHGRARARDQRWSRSPSEGREHMAHRQGSSSVSGSPAPSTSGTSTPRRGRRQLPQTPSTPRPHVSYSPVIRKAGGSGPPQQQQQQQQQQQAVARPGRAATSGPRRYPGPTAEPLAGDRPPTGGHSSGRSPRMERRVPGPARSESPRACRHGGARWPASGPHVSEGPPGPRHHGYYRGSDYDEADGPGSGGGEEAMAGAYDAPPPVRHASSGATGRSPRTPRASGPACASPSRHGRRLPNGYYPAHGLARPRGPGSRKGLHEPYSESDDDWC

SEQ ID NO: 5073 - protein, 1522 aa, Homo Sapiens
EPCALTPGPSHLALTFLPSKPGARPQPEGASWDAGPGGAPSAWADPGEGGPSPMLLPEGLSSQALSTEAPLPATLEPRIVMGEETCQALLSPRAARTALRDQEGGHASPDPPPELCSQGDLSVPSPPPDPDSFFTPPSTPTKTTYALLPACGPHGDARDSEAELRDELLDSPPASPSGSYITADGDSWASSPSCSLSLLAPAEGLDFPSGWGLSPQGSMVDERELHPAGTPEPPSSESSLSADSSSSWGQEGHFFDLDFLANDPMIPAALLPFQGSLIFQVEAVEVTPLSPEEEEEEAVADPDPGGDLAGEGEEDSTSASFLQSLSDLSITEGMDEAFAFRDDTSAASSDSDSASYAEADDERLYSGEPHAQATLLQDSVQKTEEESGGGAKGLQAQDGTVSWAVEAAPQTSDRGAYLSQRQELISEVTEEGLALGQESTATVTPHTLQVAPGLQVEVATRVTPQAGEEETDSTAGQESAAMAMPQPSQEGISEILGQESVTAEKLPTPQEETSLTLCPDSPQNLKEEGGLDLPSGRKPVAAATIVPRQAKEDLTLPQDSAMTPPLPLQDTDLSSAPKPVAAATIVSQQAEEGLTLPQDSVMTPPLPLQDTELSSAPKPVAAATLVSQQAEEGLTLPQDSAMTPPLPLQDTDLSSAPKPVAAATLVSQQAEEGLTLPQDSAMTPPLPLQDTDLSSAPKPVAAATLVSQQAEEGLTLPQDSAMTPPLPLQDTDLSSAPKPVAAATIVSQQAEEGLTLPQDSAMTPPLPLQDTDLSSAPKPVAAATIVSQQAEEGLTLPQDSAMTPPLPLQDTDLSSAPKPVAAATPVSQQAEEGLTLPQDSAMTPPLPLQDTDLSSAPKPVAAATPVSQQAEEGLTLPQDSAMTAPLPLQDTGPTSGPEPLAVATPQTLQAEAGCAPGTEPVATMAQQEVGEALGPRPAPEEKNAALPTVPEPAALDQVQQDDPQPAAEAGTPWAAQEDADSTLGMEALSLPEPASGAGEEIAEALSRPGREACLEARAHTGDGAKPDSPQKETLEVENQQEGGLKLLAQEHGPRSALGGAREVPDAPPAACPEVSQARLLSPAREERGLSGKSTPEPTLPSAVATEASLDSCPESSVGAVSSLDRGCPDAPAPTSAPTSQQPEPVLGLGSVEQPHEVPSVLGTPLLQPPENLAKGQPSTPVDRPLGPDPSAPGTLAGAALPPLEPPAPCLCQDPQEDSVEDEEPPGSLGLPPPQAGVQPAAAAVSGTTQPLGTGPRVSLSPHSPLLSPKVASMDAKDLALQILPPCQVPPPSGPQSPAGPQGLSAPEQQEDEDSLEEDSPRALGSGQHSDSHGESSAELDEQDILAPQTVQCPAQAPAGGSEETIAKAKQSRSEKKARKAMSKLGLRQIQGVTRITIQKSKNILFVIAKPDVFKSPASDTYVVFGEAKIEDLSQQVHKAAAEKFKVPSEPSALVPESAPRPRVRLECKEEEEEEEEEVDEAGLELRDIELVMAQANVSRAKAVRALRDNHSDIVNAIMELTM

SEQ ID NO: 5074 - protein, 59 aa, Homo Sapiens
MQCQLFRTETSKAVSELNYDYICIKAGTGRPQGTPTIGLVLLVRWAIIYETELQSQPIT

SEQ ID NO: 5075 - protein, 914 aa, Homo Sapiens
MSRMWGHLSEGYGQLCSIYLKLLRTKMEYHTKNPRFPGNLQMSDRQLDEAGESDVNNFFQLTVEMFDYLECELNLFQTVFNSLDMSRSVSVTAAGQCRLAPLIQVILDCSHLYDYTVKLLFKLHSCLPADTLQGHRDRFMEQFTKLKDLFYRSSNLQYFKRLIQIPQLPENPPNFLRASALSEHISPVVVIPAEASSPDSEPVLEKDDLMDMDASQQNLFDNKFDDIFGSSFSSDPFNFNSQNGVNKDEKDHLIERLYREISGLKAQLENMKTESQRVVLQLKGHVSELEADLAEQQHLRQQAADDCEFLRAELDELRRQREDTEKAQRSLSEIERKAQANEQRYSKLKEKYSELVQNHADLLRKNAEVTKQVSMARQAQVDLEREKKELEDSLERISDQGQRKTQEQLEVLESLKQELATSQRELQVLQGSLETSAQSEANWAAEFAELEKERDSLVSGAAHREEELSALRKELQDTQLKLASTEESMCQLAKDQRKMLLVGSRKAAEQVIQDALNQLEEPPLISCAGSADHLLSTVTSISSCIEQLEKSWSQYLACPEDISGLLHSITLLAHLTSDAIAHGATTCLRAPPEPADSLTEACKQYGRETLAYLASLEEEGSLENADSTAMRNCLSKIKAIGEELLPRGLDIKQEELGDLVDKEMAATSAAIETATARIEEMLSKSRAGDTGVKLEVNERILGCCTSLMQAIQVLIVASKDLQREIVESGRGTASPKEFYAKNSRWTEGLISASKAVGWGATVMVDAADLVVQGRGKFEELMVCSHEIAASTAQLVAASKVKADKDSPNLAQLQQASRGVNQATAGVVASTISGKSQIEETDNMDFSSMTLTQIKRQEMDSQVRVLELENELQKERQKLGELRKKHYELAGVAEGWEEGTEASPPTLQEVVTEKE

SEQ ID NO: 5076 - protein, 95 aa, Homo Sapiens
MKLLMVLMLAALLLHCYADSGCKLLEDMVEKTINSDISIPEYKELLQEFIDSDAAAEAMGKFKQCFLNQSHRTLKNFGLMMHTVYDSIWCNMKSN

SEQ ID NO: 5077 - protein, 219 aa, Homo Sapiens
MEYLSALNPSDLLRSVSNISSEFGRRVWTSAPPPQRPFRVCDHKRTIRKGLTAATRQELLAKALETLLLNGVLTLVLEEDGTAVDSEDFFQLLEDDTCLMVLQSGQSWSPTRSGVLSYGLGRERPKHSKDIARFTFDVYKQNPRDLFGSLNVKATFYGLYSMSCDFQGLGPKKVLRELLRWTSTLLQGLGHMLLGISSTLRHAVEGAEQWQQKGRLHSY

SEQ ID NO: 5078 - protein, 1111 aa, Homo Sapiens
GRGPEPWLGSVQGQRSLLEHHPGKKQMGYMGEMEVQGPTRESGQSLPPQKKAYLSHLSTGSGHIEGDWAGRNRKLLKPRSIQKSWFVQFPWLIMNEEQTALFCSACREYPSIRDKRSRLIEGYTGPFKVETLKYHAKSKAHMFCVNALAARDPIWAARFRSIRDPPGDVLASPEPLFTADCPIFYPPGPLGGFDSMAELLPSSRAELEDPGGDGAIPAMYLDCISDLRQKEITDGIHSSSDINILYNDAVESCIQDPSAEGLSEEVPVVFEELPVVFEDVAVYFTREEWGMLDKRQKELYRDVMRMNYELLASLGPAAAKPDLISKLERRAAPWIKDPNGPKWGKGRPPGNKKMVAVREADTQASAADSALLPGSPVEARASCCSSSICEEGDGPRRIKRTYRPRSIQRSWFGQFPWLVIDPKETKLFCSACIERPNLHDKSSRLVRGYTGPFKVETLKYHEVSKAHRLCVNTVEIKEDTPHTALVPEISSDLMANMEHFFNAAYSIAYHSRPLNDFEKILQLLQSTGTVILGKYRNRTACTQFIKYISETLKREILEDVRNSPCVSVLLDSSTDASEQACVGIYIRYFKQMEVKESYITLAPLYSETADGYFETIVSALDELDIPFRKPGWVVGLGTDGSAMLSCRGGLVEKFQEVIPQLLPVHCVAHRLHLAVVDACGSIDLVKKCDRHIRTVFKFYQSSNKRLNELQEGAAPLEQEIIRLKDLNAVRWVASRRRTLHALLVSWPALARHLQRVAEAGGQIGHRAKGMLKLMRGFHFVKFCHFLLDFLSIYRPLSEVCQKEIVLITEVNATLGRAYVALESLRHQAGPKEEEFNASFKDGRLHGICLDKLEVAEQRFQADRERTVLTGIEYLQQRFDADRPPQLKNMEVFDTMAWPSGIELASFGNDDILNLARYFECSLPTGYSEEALLEEWLGLKTIAQHLPFSMLCKNALAQHCRFPLLSKLMAVVVCVPISTSCCERGFKAMNRIRTDERTKLSNEVLNMLMMTAVNGVAVTEYDPQPAIQHWYLTSSGRRFSHVYTCAQVPARSPASARLRKEEMGALYVEEPRTQKPPILPSREAAEVLKDCIMEPPERLLYPHTSQEAPGMS

SEQ ID NO: 5079 - protein, 428 aa, Homo Sapiens
MRRTKEYVSNDAAQSDDEEKLQSQPTDTDGGRLKQKTTQLKKFLGKSVKRAKHLAEEYGERAINKVKSVRDEVFHTDQDDPSSSDDEGMPYTRPVKFKAAHGFKGPYDFDQIKVVQDLSGEHMGAVWTMKFSHCGRLLASAGQDNVVRIWALKNAFDYFNNMRMKYNTEGRVSPSPSQESLSSSKSDTDTGVCSGTDEDPDDKNAPFRQRPFCKYKGHTADLLDLSWSKNYFLLSSSMDKTVRLWHISRRECLCCFQHIDTAIAFHPRDDRYFLSGSLDGKLRLWNIPDKKVALWNEVDGQTKLITAANFCQNGKYAVIGTYDGRCIFYDTEHLKYHTQIHVRSTRGRNKVGRKITGIEPLPGENKILVTSNDSRIRLYDLRDLSLSMKYKGYVNSSSQIKQVSAMILLTSLVVQKISMFISGVPTMT

SEQ ID NO: 5080 - protein, 615 aa, Homo Sapiens
MRALLLLGFLLVSLESTLSIPPWEAPKEHKYKAEEHTVVLTVTGEPCHFPFQYHRQLYHKCTHKGRPGPQPWCATTPNFDQDQRWGYCLEPKKVKDHCSKHSPCQKGGTCVNMPSGPHCLCPQHLTGNHCQKEKCFEPQLLRFFHKNEIWYRTEQAAVARCQCKGPDAHCQRLASQACRTNPCLHGGRCLEVEGHRLCHCPVGYTGPFCDVDTKASCYDGRGLSYRGLARTTLSGAPCQPWASEATYRNVTAEQARNWGLGGHAFCRNPDNDIRPWCFVLNRDRLSWEYCDLAQCQTPTQAAPPTPVSPRLHVPLMPAQPAPPKPQPTTRTPPQSQTPGALPAKREQPPSLTRNGPLSCGQRLRKSLSSMTRVVGGLVALRGAHPYIAALYWGHSFCAGSLIAPCWVLTAAHCLQDRPAPEDLTVVLGQERRNHSCEPCQTLAVRSYRLHEAFSPVSYQHDLALLRLQEDADGSCALLSPYVQPVCLPSGAARPSETTLCQVAGWGHQFEGAEEYASFLQEAQVPFLSLERCSAPDVHGSSILPGMLCAGFLEGGTDACQGDSGGPLVCEDQAAERRLTLQGIISWGSGCGDRNKPGVYTDVAYYLAWIREHTVS

SEQ ID NO: 5081 - protein, 205 aa, Homo Sapiens
MKNIVSAFGIIPRNNRLMYIHSYQSYVWNNMVSKRIEDYGLKPVPGDLVLKGATATYIEEDDVNNYSIHDVVMPLPGFDVIYPKHKIQEAYREMLTADNLDIDNMRHKIRDYSLSGAYRKIIIRPQNVSWEVVAYDDPKIPLFNTDVDNLEGKTPPVFASEGKYRALKMDFSLPPSTYATMAIREVLKMDTSIKNQTQLNTTWLR

SEQ ID NO: 5082 - protein, 527 aa, Homo Sapiens
MAPERLRSRALSAFKLRGLLLRGEAIKYLTEALQSISELELEDKLEKIINAVEKQPLSSNMIERSVVEAAVQECSQSVDETIEHVFNIIGAFDIPRFVYNSERKKFLPLLMTNHPAPNLFGTPRDKAEMFRERYTILHQRTHRHELFTPPVIGSHPDESGSKFQLKTIETLLGSTTKIGDAIVLGMITQLKEGKFFLEDPTGTVQLDLSKAQFHSGLYTEACFVLAEGWFEDQVFHVNAFGFPPTEPSSTTRAYYGNINFFGGPSNTSVKTSAKLKQLEEENKDAMFVFLSDVWLDQVEVLEKLRIMFAGYSPAPPTCFILCGNFSSAPYGKNQVQALKDSLKTLADIICEYPDIHQSSRFVFVPGPEDPGFGSILPRPPLAESITNEFRQRVPFSVFTTNPCRIQYCTQEITVFREDLVNKMCRNCVRFPSSNLAIPNHFVKTILSQGHLTPLPLYVCPVYWAYDYALRVYPVPDLLVIADKYDPFTTTNTECLCINPGSFPRSGFSFKVFYPSNKTVEDSKLQGF

SEQ ID NO: 5083 - protein, 671 aa, Homo Sapiens
MGTQRLCGRGTQGWPGSSEQHVQEATSSAGLHSGVDELGVRSEPGGRLPERSLGPAHPAPAAMAGTLDLDKGCTVEELLRGCIEAFDDSGKVRDPQLVRMFLMMHPWYIPSSQLAAKLLHIYQQSRKDNSNSLQVKTCHLVRYWISAFPAEFDLNPELAEQIKELKALLDQEGNRRHSSLIDIDSVPTYKWKRQVTQRNPVGQKKRKMSLLFDHLEPMELAEHLTYLEYRSFCKILFQDYHSFVTHGCTVDNPVLERFISLFNSVSQWVQLMILSKPTAPQRALVITHFVHVAEKLLQLQNFNTLMAVVGGLSHSSISRLKETHSHVSPETIKLWEGLTELVTATGNYGNYRRRLAACVGFRFPILGVHLKDLVALQLALPDWLDPARTRLNGAKMKQLFSILEELAMVTSLRPPVQANPDLLSLLTVSLDQYQTEDELYQLSLQREPRSKSSPTSPTSCTPPPRPPVLEEWTSAAKPKLDQALVVEHIEKMVESVFRNFDVDGDGHISQEEFQIIRGNFPYLSAFGDLDQNQDGCISREEMVSYFLRSSSVLGGRMGFVHNFQESNSLRPVACRHCKALILGIYKQGLKCRACGVNCHKQCKDRLSVECRRRAQSVSLEGSAPSPSPMHSHHHRAFSFSLPRPGRRGSRPPEIREEEVQTVEDGVFDIHL

SEQ ID NO: 5084 - protein, 332 aa, Homo Sapiens
MSTVKEQLIEKLIEDDENSQCKITIVGTGAVGMACAISILLKDLADELALVDVALDKLKGEMMDLQHGSLFFSTSKITSGKDYSVSANSRIVIVTAGARQQEGETRLALVQRNVAIMKSIIPAIVHYSPDCKILVVSNPVDILTYIVWKISGLPVTRVIGSGCNLDSARFRYLIGEKLGVHPTSCHGWIIGEHGDSSVPLWSGVNVAGVALKTLDPKLGTDSDKEHWKNIHKQVIQSAYEIIKLKGYTSWAIGLSVMDLVGSILKNLRRVHPVSTMVKGLYGIKEELFLSIPCVLGRNGVSDVVKINLNSEEEALFKKSAETLWNIQKDLIF

SEQ ID NO: 5085 - protein, 477 aa, Homo Sapiens
MGAGVLVLGASEPGNLSSAAPLPDGAATAARLLVPASPPASLLPPASESPEPLSQQWTAGMGLLMALIVLLIVAGNVLVIVAIAKTPRLQTLTNLFIMSLASADLVMGLLVVPFGATIVVWGRWEYGSFFCELWTSVDVLCVTASIETLCVIALDRYLAITSPFRYQSLLTRARARGLVCTVWAISALVSFLPILMHWWRAESDEARRCYNDPKCCDFVTNRAYAIASSVVSFYVPLCIMAFVYLRVFREAQKQVKKIDSCERRFLGGPARPPSPSPSPVPAPAPPPGPPRPAAAAATAPLANGRAGKRRPSRLVALREQKALKTLGIIMGVFTLCWLPFFLANVVKAFHRELVPDRLFVFFNWLGYANSAFNPIIYCRSPDFRKAFQGLLCCARRAARRRHATHGDRPRASGCLARPGPPPSPGAASDDDDDDVVGATPPARLLEPWAGCNGGAAADSDSSLDEPCRPGFASESKV

SEQ ID NO: 5086 - protein, 745 aa, Homo Sapiens
MLTMGRLQLVVLGLTCCWAVASAAKLGAVYTEGGFVEGVNKKLGLLGDSVDIFKGIPFAAPTKALENPQPHPGWQGTLKAKNFKKRCLQATITQDSTYGDEDCLYLNIWVPQGRKQVSRDLPVMIWIYGGAFLMGSGHGANFLNNYLYDGEEIATRGNVIVVTFNYRVGPLGFLSTGDANLPGNYGLRDQHMAIAWVKRNIAAFGGDPNNITLFGESAGGASVSLQTLSPYNKGLIRRAISQSGVALSPWVIQKNPLFWAKKVAEKVGCPVGDAARMAQCLKVTDPRALTLAYKVPLAGLEYPMLHYVGFVPVIDGDFIPADPINLYANAADIDYIAGTNNMDGHIFASIDMPAINKGNKKVTEEDFYKLVSEFTITKGLRGAKTTFDVYTESWAQDPSQENKKKTVVDFETDVLFLVPTEIALAQHRANAKSAKTYAYLFSHPSRMPVYPKWVGADHADDIQYVFGKPFATPTGYRPQDRTVSKAMIAYWTNFAKTGDPNMGDSAVPTHWEPYTTENSGYLEITKKMGSSSMKRSLRTNFLRYWTLTYLALPTVTDQEATPVPPTGDSEATPVPPTGDSETAPVPPTGDSGAPPVPPTGDSGAPPVPPTGDSGAPPVPPTGDSGAPPVPPTGDSGAPPVPPTGDSGAPPVPPTGDSGAPPVPPTGDAGPPPVPPTGDSGAPPVPPTGDSGAPPVTPTGDSETAPVPPTGDSGAPPVPPTGDSEAAPVPPTDDSKEAQMPAVIRF

SEQ ID NO: 5087 - protein, 761 aa, Homo Sapiens
MARRPRHSIYSSDEDDEDFEMCDHDYDGLLPKSGKRHLGKTRWTREEDEKLKKLVEQNGTDDWKVIANYLPNRTDVQCQHRWQKVLNPELIKGPWTKEEDQRVIELVQKYGPKRWSVIAKHLKGRIGKQCRERWHNHLNPEVKKTSWTEEEDRIIYQAHKRLGNRWAEIAKLLPGRTDNAIKNHWNSTMRRKVEQEGYLQESSKASQPAVATSFQKNSHLMGFAQAPPTAQLPATGQPTVNNDYSYYHISEAQNVSSHVPYPVALHVNIVNVPQPAAAAIQRHYNDEDPEKEKRIKELELLLMSTENELKGQQVLPTQNHTCSYPGWHSTTIADHTRPHGDSAPVSCLGEHHSTPSLPADPGSLPEESASPARCMIVHQGTILDNVKNLLEFAETLQFIDSDSSSWCDLSSFEFFEEADFSPSQHHTGKALQLQQREGNGTKPAGEPSPRVNKRMLSESSLDPPKVLPPARHSTIPLVILRKKRGQASPLATGDCSSFIFADVSSSTPKRSPVKSLPFSPSQFLNTSSNHENSDLEMPSLTSTPLIGHKLTVTTPFHRDQTVKTQKENTVFRTPAIKRSILESSPRTPTPFKHALAAQEIKYGPLKMLPQTPSHLVEDLQDVIKQESDESGIVAEFQENGPPLLKKIKQEVESPTDKSGNFFCSHHWEGDSLNTQLFTQTSPVADAPNILTSSVLMAPASEDEDNVLKAFTVPKNRSLASPLQPCSSTWEPASCGKMEEQMTSSSQARKYVNAFSARTLVM

SEQ ID NO: 5088 - protein, 776 aa, Homo Sapiens
MAAPGDPQDELLPLAGPGSQWLRHRGEGENEAVTPKGATPAPQAGEPSPGLGARAREAASREAGSGPARQSPVAMETASTGVAGVSSAMDHTFSTTSKDGEGSCYTSLISDICYPPQEDSTYFTGILQKENGHVTISESPEELGTPGPSLPDVPGIESRGLFSSDSGIEMTPAESTEVNKILADPLDQMKAEAYKYIDITRPEEVKHQEQHHPELEDKDLDFKNKDTDISIKPEGVREPDKPAPVEGKIIKDHLLEESTFAPYIDDLSEEQRRAPQITTPVKITLTEIEPSVETTTQEKTPEKQDICLKPSPDTVPTVTVSEPEDDSPGSITPPSSGTEPSAAESQGKGSISEDELITAIKEAKGLSYETAENPRPVGQLADRPEVKARSGPPTIPSPLDHEASSAESGDSEIELVSEDPMAAEDALPSGYVSFGHVGGPPPSPASPSIQYSILREEREAELDSELIIESCDASSASEESPKREQDSPPMKPSALDAIREETGVRAEERAPSRRGLAEPGSFLDYPSTEPQPGPELPPGDGALEPETPMLPRKPEEDSSSNQSPAATKGPGPLGPGAPPPLLFLNKQKAIDLLYWRDIKQTGIVFGSFLLLLFSLTQFSVVSVVAYLALAALSATISFRIYKSVLQAVQKTDEGHPFKAYLELEITLSQEQIQKYTDCLQFYVNSTLKELRRLFLVQDLVDSLKFAVLMWLLTYVGALFNGLTLLLMAVVSMFTLPVVYVKHQAQIDQYLGLVRTHINAVVAKIQAKIPGAKRHAE

SEQ ID NO: 5089 - protein, 222 aa, Homo Sapiens
MKLPLLLALLFGAVSALHLRSETSTFETPLGAKTLPEDEETPEQEMEETPCRELEEEEEWGSGSEDASKKDGAVESISVPDMVDKNLTCPEEEDTVKVVGIPGCQTCRYLLVRSLQTFSQAWFTCRRCYRGNLVSIHNFNINYRIQCSVSALNQGQVWIGGRITGSGRCRRFQWVDGSRWNFAYWAAHQPWTRGGHCVALCTRGGYWRRAHCLRRLPFICSY

SEQ ID NO: 5090 - protein, 906 aa, Homo Sapiens
MAGNVKKSSGAGGGTGSGGSGSGGLIGLMKDAFQPHHHHHHHLSPHPPGTVDKKMVEKCWKLMDKVVRLCQNPKLALKNSPPYILDLLPDTYQHLRTILSRYEGKMETLGENEYFRVFMENLMKKTKQTISLFKEGKERMYEENSQPRRNLTKLSLIFSHMLAELKGIFPSGLFQGDTFRITKADAAEFWRKAFGEKTIVPWKSFRQALHEVHPISSGLEAMALKSTIDLTCNDYISVFEFDIFTRLFQPWSSLLRNWNSLAVTHPGYMAFLTYDEVKARLQKFIHKPGSYIFRLSCTRLGQWAIGYVTADGNILQTIPHNKPLFQALIDGFREGFYLFPDGRNQNPDLTGLCEPTPQDHIKVTQEQYELYCEMGSTFQLCKICAENDKDVKIEPCGHLMCTSCLTSWQESEGQGCPFCRCEIKGTEPIVVDPFDPRGSGSLLRQGAEGAPSPNYDDDDDERADDTLFMMKELAGAKVERPPSPFSMAPQASLPPVPPRLDLLPQRVCVPSSASALGTASKAASGSLHKDKPLPVPPTLRDLPPPPPPDRPYSVGAESRPQRRPLPCTPGDCPSRDKLPPVPSSRLGDSWLPRPIPKVPVSAPSSSDPWTGRELTNRHSLPFSLPSQMEPRPDVPRLGSTFSLDTSMSMNSSPLVGPECDHPKIKPSSSANAIYSLAARPLPVPKLPPGEQCEGEEDTEYMTPSSRPLRPLDTSQSSRACDCDQQIDSCTYEAMYNIQSQAPSITESSTFGEGNLAAAHANTGPEESENEDDGYDVPKPPVPAVLARRTLSDISNASSSFGWLSLDGDPTTNVTEGSQVPERPPKPFPRRINSERKAGSCQQGSGPAASAATASPQLSSEIENLMSQGYSYQDIQKALVIAQNNIEMAKNILREFVSISSPAHVAT

SEQ ID NO: 5091 - protein, 109 aa, Homo Sapiens
MKFISTSLLLMLLVSSLSPVQGVLEVYYTSLRCRCVQESSVFIPRRFIDRIQILPRGNGCPRKEIIVWKKNKSIVCVDPQAEWIQRMMEVLRKRSSSTLPVPVFKRKIP

SEQ ID NO: 5092 - protein, 515 aa, Homo Sapiens [sequence omitted]

SEQ ID NO: 5093 - protein, 339 aa, Homo Sapiens
MTKATPAVRTAYKFAKNHAKLGLKEVKSKLKHKENEEDYGTCSSSVQYTPVYKLHNEKGGNSEKRKLAQARLKRPLKSLDGALYDDEDDDDIERASKLSSEDGEEASAYLYESDDSVETRVKTPYSGEMDLLGEILDTLSTHSSDQGKLAAAKSLDFFRSMDDIDYKPTNKSNAPSENNLAFLCGGSGDQAEWNLGQDDSALHGKHLPPSPRKRVSSSGLTDSLFILREENSNKHLGADNVSDPTSGLDFQLTSPEVSQTDKGKTEKRETLSQISDDLLIPGLGRHSSTFVPWEKEGKEAKETSEDIGLLHEVVSLCHMTSDFQQSLNISDKNTNGNQT

SEQ ID NO: 5094 - protein, 396 aa, Homo Sapiens
MKTLLLLLLVLLELGEAQGSLHRVPLRRHPSLKKKLRARSQLSEFWKSHNLDMIQFTESCSMDQSAKEPLINYLDMEYFGTISIGSPPQNFTVIFDTGSSNLWVPSVYCTSPACKTHSRFQPSQSSTYSQPGQSFSIQYGTGSLSGIIGADQVSVEGLTVVGQQFGESVTEPGQTFVDAEFDGILGLGYPSLAVGGVTPVFDNMMAQNLVDLPMFSVYMSSNPEGGAGSELIFGGYDHSHFSGSLNWVPVTKQAYWQIALDNIQVGGTVMFCSEGCQAIVDTGTSLITGPSDKIKQLQNAIGAAPVDGEYAVECANLNVMPDVTFTINGVPYTLSPTAYTLLDFVDGMQFCSSGFQGLDIHPPAGPLWILGDVFIRQFYSVFDRGNNRVGLAPAVP

SEQ ID NO: 5095 - protein, 259 aa, Homo Sapiens
MSEVPVARVWLVLLLLTVQVGVTAGAPWQCAPCSAEKLALCPPVSASCSEVTRSAGCGCCPMCALPLGAACGVATARCARGLSCRALPGEQQPLHALTRGQGACVQESDASAPHAAEAGSPESPESTEITEEELLDNFHLMAPSEEDHSILWDAISTYDGSKALHVTNIKKWKEPCRIELYRVVESLAKAQETSGEEISKFYLPNCNKNGFYHSRQCETSMDGEAGLCWCVYPWNGKRIPGSPEIRGDPNCQMYFNVQN

SEQ ID NO: 5096 - protein, 879 aa, Homo Sapiens
SSTLGTAHTPKVVTTMATMPTATASTVPSSSTVGTTRTPAVLPSSLPTFSVSTVSSSVLTTLRPTGFPSSHFSTPCFCRAFGQFFSPGEVIYNKTDRAGCHFYAVCNQHCDIDRFQGACPTSPPPVSSAPLSSPSPAPGCDNAIPLRQVNETWTLENCTVARCVGDNRVVLLDPKPVANVTCVNKHLPIKVSDPSQPCDFHYECECICSMWGGSHYSTFDGTSYTFRGNCTYVLMREIHARFGNLSLYLDNHYCTASATAAAARCPAALSIHYKSMDIVLTVTMVHGKEEGLILFDPIPVSSGFSKNGVLVSVLGTTTMAVDIPALGVSVTFNGQVFQARLPYSLFHNNTEGQCGTCTNNQRDDCLQRDGTTAASCKDMAKTWLVPDSRKDGCWAPTGTPPTASPAAPVSSTPTPTPCPPQLLCDLMLSQVFAECHTLLPPGPFFNACISDHCRGRLEVPCQSLEAYAELCRARGVCSDWRGATGGLCDLTCPPTKVYKPCGPIQPATCNSRNQSPQLEGMAEGCFCPEDQILFNAHMGICVQACPCVGPDGFPKFPGERWVSNCQSCVCDEGSVSVQCKPLPCDAQGQPPPCNRPGFVTVTRPRAETPCCPETVCVCNTTTCPQSLPVCPPGQESICTQEEGDCCPTFRCRPQLCSYNGTFYGVGATFPGALPCHMCTCLSGDTQDPTVQCQEDACNNTTCPQGFEYKRVAGQCCGECVQTACLTPDGQPVQLNETWVNSHVDNCTVYLCESEGGVHLLTPQPASCPDVSSCRGSLRKTGCCYSCEEDSCQCRINTTILWHQGCETEVNITFCEGSCPGASKYSAEAQAMQHQCTCCQERRVHEETVPLHCPNGSAILHTYTHVDECGCTPFCVPAPM

SEQ ID NO: 5097 - protein, 1115 aa, Homo Sapiens
MERAISPGLLVRALLLLLLLGLAARTVAAGRARGLPAPTAEAAFGLGAAAAPTSATRVPAAGAVAAAEVTVEDAEALPAAAGEQEPRGPEPDDETELRPRGRSLVIISTLDGRIAALDPENHGKKQWDLDVGSGSLVSSSLSKPEVFGNKMIIPSLDGALFQWDRDRESMETVPFTVESLLESSYKFGDDVVLVGGKSLTTYGLSAYSGKVRYICSALGCRQWDSDEMEQEEDILLLQRTQKTVRAVGPRSGNEKWNFSVGHFELRYIPDMETRAGFIESTFKPNENTEESKIISDVEEQEAAIMDIVIKVSVADWKVMAFSKKGGHLEWEYQFCTPIASAWLLKDGKVIPISLFDDTSYTSNDDVLEDEEDIVEAARGATENSVYLGMYRGQLYLQSSVRISEKFPSSPKALESVTNENAIIPLPTIKWKPLIHSPSRTPVLVGSDEFDKCLSNDKFSHEEYSNGALSILQYPYDNGYYLPYYKRERHKRSTQITVRFLDNPHYNKNIRKKDPVLLLHWWKEIVATILFCIIATTFIVRRLFHPHPHRQRKESETQCQTENKYDSVSGEANDSSWNDIKNSGYISRYLTDFEPIQCLGRGGFGVVFEAKNKVDDCNYAIKRIRLPNRELAREKVMREVKALAKLEHPGIVRYFNAWLEAPPEKWQEKMDEIWLKDESTDWPLSSPSPMDAPSVKIRRMDPFSTKEHIEIIAPSPQRSRSFSVGISCDQTSSSESQFSPLEFSGMDHEDISESVDAAYNLQDSCLTDCDVEDGTMDGNDEGHSFELCPSEASPYVRSRERTSSSIVFEDSGCDNASSKEEPKTNRLHIGNHCANKLTAFKPTSSKSSSEATLSISPPRPTTLSLDLTKNTTEKLQPSSPKVYLYIQMQLCRKENLKDWMNGRCTIEERERSVCLHIFLQIAEAVEFLHSKGLMHRDLKPSNIFFTMDDVVKVGDFGLVTAMDQDEEEQTVLTPMPAYARHTGQVGTKLYMSPEQIHGNSYSHKVDIFSLGLILFELLYPFSTQMERVRTLTDVRNLKFPPLFTQKYPCEYVMVQDMLSPSPMERPEAINIIENAVFEDLDFPGKTVLRQRSRSLSSSGTKHSRQSNNSHSPLPSN

SEQ ID NO: 5098 - protein, 512 aa, Homo Sapiens [sequence omitted]

SEQ ID NO: 5099 - protein, 1 aa, Homo Sapiens
W

SEQ ID NO: 5100 - protein, 522 aa, Homo Sapiens
MAVNKGLTLLDGDLPEQENVLQRVLQLPVVSGTCECFQKTYTSTKEAHPLVASVCNAYEKGVQSASSLAAWSMEPVVRRLSTQFTAANELACRGLDHLEEKIPALQYPPEKIASELKDTISTRLRSARNSISVPIASTSDKVLGAALAGCELAWGVARDTAEFAANTRAGRLASGGADLALGSIEKVVEYLLPADKEESAPAPGHQQAQKSPKAKPSLLSRVGALTNTLSRYTVQTMARALEQGHTVAMWIPGVVPLSSLAQWGASVAMQAVSRRRSEVRVPWLHSLAAAQEEDHEDQTDTEGEDTEEEEELETEENKFSEVAALPGPRGLLGGVAHTLQKTLQTTISAVTWAPAAVLGMAGRVLHLTPAPAVSSTKGRAMSLSDALKGVTDNVVDTVVHYVPLPRLSLMEPESEFRDIDNPPAEVERREAERRASGAPSAGPEPAPRLAQPRRSLRSAQSPGAPPGPGLEDEVATPAAPRPGFPAVPREKPKRRVSDSFFRPSVMEPIVGRTHYSQLRKKS

SEQ ID NO: 5101 - protein, 495 aa, Homo Sapiens
MDIKNSPSSLNSPSSYNCSQSILPLEHGSIYIPSSYVDSHHEYPAMTFYSPAVMNYSIPSNVTNLEGGPGRQTTSPNVLWPTPGHLSPLVVHRQLSHLYAEPQKSPWCEARSLEHTLPVNRETLKRKVSGNRCASPVTGPGSKRDAHFCAVCSDYASGYHYGVWSCEGCKAFFKRSIQGHNDYICPATNQCTIDKNRRKSCQACRLRKCYEVGMVKCGSRRERCGYRLVRRQRSADEQLHCAGKAKRSGGHAPRVRELLLDALSPEQLVLTLLEAEPPHVLISRPSAPFTEASMMMSLTKLADKELVHMISWAKKIPGFVELSLFDQVRLLESCWMEVLMMGLMWRSIDHPGKLIFAPDLVLDRDEGKCVEGILEIFDMLLATTSRFRELKLQHKEYLCVKAMILLNSSMYPLVTATQDADSSRKLAHLLNAVTDALVWVIAKSGISSQQQSMRLANLLMLLSHVRHARAEKASQTLTSFGMKMETLLPEATMEQ

SEQ ID NO: 5102 - protein, 2412 aa, Homo Sapiens [sequence omitted]

SEQ ID NO: 5103 - protein, 389 aa, Homo Sapiens
MTSEDQEPERDYENESESSEPKLGEESMEGDEHIHSEVSEKVLMNSERPDENHSEPSHQDVIKVKEEFTDPTYDMFYMSQYGLYNGGGASMAALHESFTSSLNYGSPQKFSPEGDLCSSPDPKICYVCKKSFKSSYSVKLHYRNVHLKEMHVCTVAGCNAAFPSRRSRDRHSANINLHRKLLTKELDDMGLDSSQPSLSKDLRDEFLVKIYGAQHPMGLDVREDASSPAGTEDSHLNGYGRGMAEDYMVLDLSTTSSLQSSSSIHSSRESDAGSDEGILLDDIDGASDSGESAHKAEAPALPGSLGAEVSGSLMFSSLSGSNGGIMCNICHKMYSNKGTLRVHYKTVHLREMHKCKVPGCNMMFSSVRSRNRHSQNPNLHKNIPFTSVD

SEQ ID NO: 5104 - protein, 94 aa, Homo Sapiens
MSVKGMAIALAVILCATVVQGFPMFKRGRCLCIGPGVKAVKVADIEKASIMYPSNNCDKIEVIITLKENKGQRCLNPKSKQARLIIKKVERKNF

SEQ ID NO: 5105 - protein, 18 aa, Homo Sapiens
MEAVETGERPTFGAWDYG

SEQ ID NO: 5106 - protein, 1429 aa, Homo Sapiens
MAGGAWGRLACYLEFLKKEELKEFQLLLANKAHSRSSSGETPAQPEKTSGMEVASYLVAQYGEQRAWDLALHTWEQMGLRSLCAQAQEGAGHSPSFPYSPSEPHLGSPSQPTSTAVLMPWIHELPAGCTQGSERRVLRQLPDTSGRRWREISASLLYQALPSSPDHESPSQESPNAPTSTAVLGSWGSPPQPSLAPREQEAPGTQWPLDETSGIYYTEIREREREKSEKGRPPWAAVVGTPPQAHTSLQPHHHPWEPSVRESLCSTWPWKNEDFNQKFTQLLLLQRPHPRSQDPLVKRSWPDYVEENRGHLIEIRDLFGPGLDTQEPRIVILQGAAGIGKSTLARQVKEAWGRGQLYGDRFQHVFYFSCRELAQSKVVSLAELIGKDGTATPAPIRQILSRPERLLFILDGVDEPGWVLQEPSSELCLHWSQPQPADALLGSLLGKTILPEASFLITARTTALQNLIPSLEQARWVEVLGFSESSRKEYFYRYFTDERQAIRAFRLVKSNKELWALCLVPWVSWLACTCLMQQMKRKEKLTLTSKTTTTLCLHYLAQALQAQPLGPQLRDLCSLAAEGIWQKKTLFSPDDLRKHGLDGAIISTFLKMGILQEHPIPLSYSFIHLCFQEFFAAMSYVLEDEKGRGKHSNCIIDLEKTLEAYGIHGLFGASTTRFLLGLLSDEGEREMENIFHCRLSQGRNLMQWVPSLQLLLQPHSLESLHCLYETRNKTFLTQVMAHFEEMGMCVETDMELLVCTFCIKFSRHVKKLQLIEGRQHRSTWSPTMVVLFRWVPVTDAYWQILFSVLKVTRNLKELDLSGNSLSHSAVKSLCKTLRRPRCLLETLRLAGCGLTAEDCKDLAFGLRANQTLTELDLSFNVLTDAGAKHLCQRLRQPSCKLQRLQLVSCGLTSDCCQDLASVLSASPSLKELDLQQNNLDDVGVRLLCEGLRHPACKLIRLGLDQTTLSDEMRQELRALEQEKPQLLIFSRRKPSVMTPTEGLDTGEMSNSTSSLKRQRLGSERAASHVAQANLKLLDVSKIFPIAEIAEESSPEVVPVELLCVPSPASQGDLHTKPLGTDDDFWGPTGPVATEVVDKEKNLYRVHFPVAGSYRWPNTGLCFVMREAVTVEIEFCVWDQFLGEINPQHSWMVAGPLLDIKAEPGAVEAVHLPHFVALQGGHVDTSLFQMAHFKEEGMLLEKPARVELHHIVLENPSFSPLGVLLKMIHNALRFIPVTSVVLLYHRVHPEEVTFHLYLIPSDCSIRKELELCYRSPGEDQLFSEFYVGHLGSGIRLQVKDKKDETLVWEALVKPGDLMPATTLIPPARIAVPSPLDAPQLLHFVDQYREQLIARVTSVEVVLDKLHGQVLSQEQYERVLAENTRPSQMRKLFSLSQSWDRKCKDGLYQALKETHPHLIMELWEKGSKKGLLPLSS

SEQ ID NO: 5107 - protein, 411 aa, Homo Sapiens
MQCSWKAVLLLALASIAIQYTAIRTFTAKSFHTCPGLAEAGLAERLCEESPTFAYNLSRKTHILILATTRSGSSFVGQLFNQHLDVFYLFEPLYHVQNTLIPRFTQGKSPADRRVMLGASRDLLRSLYDCDLYFLENYIKPPPVNHTTDRIFRRGASRVLCSRPVCDPPGPADLVLEEGDCVRKCGLLNLTVAAEACRERSHVAIKTVRVPEVNDLRALVEDPRLNLKVIQLVRDPRGILASRSETFRDTYRLWRLWYGTGRKPYNLDVTQLTTVCEDFSNSVSTGLMRPPWLKGKYMLVRYEDLARNPMKKTEEIYGFLGIPLDSHVARWIQNNTRGDPTLGKHKYGTVRNSAATAEKWRFRLSYDIVAFAQNACQQVLAQLGYKIAASEEELKNPSVSLVEERDFRPFS

SEQ ID NO: 5108 - protein, 295 aa, Homo Sapiens
MQPEGAEKGKSFKQRLVLKSSLAKETLSEFLGTFILIVLGCGCVAQAILSRGRFGGVITINVGFSMAVAMAIYVAGGVSGGHINPAVSLAMCLFGRMKWFKLPFYVGAQFLGAFVGAATVFGIYYDGLMSFAGGKLLIVGENATAHIFATYPAPYLSLANAFADQVVATMILLIIVFAIFDSRNLGAPRGLEPIAIGLLIIVIASSLGLNSGCAMNPARDLSPRLFTALAGWGFEVFRAGNNFWWIPVVGPLVGAVIGGLIYVLVIEIHHPEPDSVFKAEQSEDKPEKYELSVIM

SEQ ID NO: 5109 - protein, 533 aa, Homo Sapiens
MSASTGGGGDSGGSGGSSSSSQASCGPESSGSELALATPVPQMLQGLLGSDDEEQEDPKDYCKGGYHPVKIGDVFNGRYHVVRKLGWGHFSTVWLCWDIQRKRFVALKVVKSAGHYTETAVDEIKLLKCVRDSDPSDPKRETIVQLIDDFRISGVNGVHVCMVLEVLGHQLLKWIIKSNYQGLPVPCVKSIVRQVLHGLDYLHTKCKIIHTDIKPENILLCVGDAYIRRLAAEATEWQQAGAPPPSRSIVSTAPQEVLTGKLSKNKRKKMRRKRKQQKRLLEERLRDLQRLEAMEAATQAEDSGLRLDGGSGSTSSSGFSGSLFSPASCSILSGSSNQRETGGLLSPSTPFGASNLLVNPLEPQNADKIKIKIADLGNACWVHKHFTEDIQTRQYRAVEVLIGAEYGPPADIWSTACMAFELATGDYLFEPHSGEDYSRDEDHIAHIVELLGDIPPAFALSGRYSREFFNRRGELRHIHNLKHWGLYEVLMEKYEWPLEQATQFSAFLLPMMEYIPEKRASAADCLQHPWLNP

SEQ ID NO: 5110 - protein, 690 aa, Homo Sapiens
MAPWPELGDAQPNPDKYLEGAAGQQPTAPDKSKETNKTDNTEAPVTKIELLPSYSTATLIDEPTEVDDPWNLPTLQDSGIKWSERDTKGKILCFFQGIGRLILLLGFLYFFVCSLDILSSAFQLVGGKMAGQFFSNSSIMSNPLLGLVIGVLVTVLVQSSSTSTSIVVSMVSSSLLTVRAAIPIIMGANIGTSITNTIVALMQVGDRSEFRRAFAGATVHDFFNWLSVLVLLPVEVATHYLEIITQLIVESFHFKNGEDAPDLLKVITKPFTKLIVQLDKKVISQIAMNDEKAKNKSLVKIWCKTFTNKTQINVTVPSTANCTSPSLCWTDGIQNWTMKNVTYKENIAKCQHIFVNFHLPDLAVGTILLILSLLVLCGCLIMIVKILGSVLKGQVATVIKKTINTDFPFPFAWLTGYLAILVGAGMTFIVQSSSVFTSALTPLIGIGVITIERAYPLTLGSNIGTTTTAILAALASPGNALRSSLQIALCHFFFNISGILLWYPIPFTRLPIRMAKGLGNISAKYRWFAVFYLIIFFFLIPLTVFGLSLAGWRVLVGVGVPVVFIIILVLCLRLLQSRCPRVLPKKLQNWNFLPLWMRSLKPWDAVVSKFTGCFQMRCCYCCRVCCRACCLLCGCPKCCRCSKCCEDLEEAQEGQDVPVKAPETFDNITISREAQGEVPASDSKTECTAL

SEQ ID NO: 5111 - protein, 343 aa, Homo Sapiens
MESKYKEILLLTGLDNITDEELDRFKFFLSDEFNIATGKLHTANRIQVATLMIQNAGAVSAVMKTIRIFQKLNYMLLAKRLQEEKEKVDKQYKSVTKPKPLSQAEMSPAASAAIRNDVAKQRAAPKVSPHVKPEQKQMVAQQESIREGFQKRCLPVMVLKAKKPFTFETQEGKQEMFHATVATEKEFFFVKVFNTLLKDKFIPKRIIIIARYYRHSGFLEVNSASRVLDAESDQKVNVPLNIIRKAGETPKINTLQTQPLGTIVNGLFVVQKVTEKKKNILFDLSDNTGKMEVLGVRNEDTMKCKEGDKVRLTFFTLSKNGEKLQLTSGVHSTIKVIKAKKKT

SEQ ID NO: 5112 - protein, 2296 aa, Homo Sapiens
KSREQSSLFAADAERSWGGKSCCLLRWRFVGKASHFPRLLPLPGEERPETKERAWKMEQTWTRDYFAEDDGEMVPRTSHTAAFLSDTKDRGPPVQSQIWRSGEKVPFVQTYSLRAFEKPPQVQTQALRDFEKHLNDLKKENFSLKLRIYFLEERMQQKYEASREDIYKRNIELKVEVESLKRELQDKKQHLDKTWADVENLNSQNEAELRRQFEERQQETEHVYELLENKIQLLQEESRLAKNEAARMAALVEAEKECNLELSEKLKGVTKNWEDVPGDQVKPDQYTEALAQRDKRIEELNQSLAAQERLVEQLSREKQQLLHLLEEPTSMEVQPMTEELLKQQKLNSHETTITQQSVSDSHLAELQEKIQQTEATNKILQEKLNEMSYELKCAQESSQKQDGTIQNLKETLKSRERETEELYQVIEGQNDTMAKLREMLHQSQLGQLHSSEGTSPAQQQVALLDLQSALFCSQLEIQKLQRVVRQKERQLADAKQCVQFVEAAAHESEQQKEASWKHNQELRKALQQLQEELQNKSQQLRAWEAEKYNEIRTQEQNIQHLNHSLSHKEQLLQEFRELLQYRDNSDKTLEANEMLLEKLRQRIHDKAVALERAIDEKFSALEEKEKELRQLRLAVRERDHDLERLRDVLSSNEATMQSMESLLRAKGLEVEQLSTTCQNLQWLKEEMETKFSRWQKEQESIIQQLQTSLHDRNKEVEDLSATLLCKLGPGQSEIAEELCQRLQRKERMLQDLLSDRNKQVLEHEMEIQGLLQSVSTREQESQAAAEKLVQALMERNSELQALRQYLGGRDSLMSQAPISNQQAEVTPTGRLGKQTDQGSMQIPSRDDSTSLTAKEDVSIPRSTLGDLDTVAGLEKELSNAKEELELMAKKERESQMELSALQSMMAVQEEELQVQAADMESLTRNIQIKEDLIKDLQMQLVDPEDIPAMERLTQEVLLLREKVASVESQGQEISGNRRQQLLLMLEGLVDERSRLNEALQAERQLYSSLVKFHAHPESSERDRTLQVELEGAQVLRSRLEEVLGRSLERLNRLETLAAIGGAAAGDDTEDTSTEFTDSIEEEAAHHSHQQLVKVALEKSLATVETQNPSFSPPSPMGGDSNRCLQEEMLHLRAEFHQHLEEKRKAEEELKELKAQIEEAGFSSVSHIRNTMLSLCLENAELKEQMGEAMSDGWEIEEDKEKGELDNQSQPRDPGPQSAFSLPGSTQHLRSQLSQCKQRYQDLQEKLLLSEATVFAQANELEKYRVMLTGESLVKQDSKQIQVDLQDLGYETCGRSENEAEREETTSPECEEHNSLKEMVLMEGLCSEQGRRGSTLASSSERKPLENQLGKQEEFRVYGKSENILVLRKDIKDLKAQLQNANKVIQNLKSRVRSLSVTSDYSSSLERPRKLRAVGTLEGSSPHSVPDEDEGWLSDGTGAFYSPGLQAKKDLESLIQRVSQLEAQLPKNGLEEKLAEELRSASWPGKYDSLIQDQARELSYLRQKIREGRGICYLITRHAKDTVKSFEDLLRSNDIDYYLGQSFREQLAQGSQLTERLTSKLSTKDHKSEKDQAGLEPLALRLSRELQEKEKVIEVLQAKLDARSLTPSSSHALSDSHRSPSSTSFLSDELEACSDMDIVSEYTHYEEKKASPSHSDSIHHSSHSAVLSSKPSSTSASQGAKAESNSNPISLPTPQNTPKEANQAHSGASTVPPASTATLLSNDLEADSSYYLNSAQPHSPPRGTIELGRILEPGYLGSSGKWDVMRPQKGSVSGDLSSGSSVYQLNSKPTGADLLEEHLGEIRNLRQRLEESICINDRLREQLEHRLTSTARGRGSTSNFYSQGLESIPQLCNENRVLREDNRRLQAQLSHVSREHSQETESLREALLSSRSHLQELEKELEHQKVERQQLLEDLREKQQEVLHFREERLSLQENDSRLQHKLVLLQQQCEEKQQLFESLQSELQIYEALYGNSKKGLKAYSLDACHQIPLSSDLSHLVAEVRALRGQLEQSIQGNNCLRLQLQQQLESGAGKASLSPSSINQNFPASTDPGNKQLLLQDSAVSPPVRDVGMNSPALVFPSSASSTPGSETPIINRANGLGLDTSPVMKTPPKLEGDATDGSFANKHGRHVIGHIDDYSALRQQIAEGKLLVKKIVSLVRSACSFPGLEAQGTEVLGSKGIHELRSSTSALHHALEESASLLTMFWRAALPSTHIPVLPGKVGESTERELLELRTKVSKQERLLQSTTEHLKNANQQKESMEQFIVSQLTRTHDVLKKARTNLEVKSLRALPCTPAL

SEQ ID NO: 5113 - protein, 600 aa, Homo Sapiens
MRSCLWRCRHLSQGVQWSLLLAVLVFFLFALPSFIKEPQTKPSRHQRTENIKERSLQSLAKPKSQAPTRARRTTIYAEPVPENNALNTQTQPKAHTTGDRGKEANQAPPEEQDKVPHTAQRAAWKSPEKEKTMVNTLSPRGQDAGMASGRTEAQSWKSQDTKTTQGNGGQTRKLTASRTVSEKHQGKAATTAKTLIPKSQHRMLAPTGAVSTRTRQKGVTTAVIPPKEKKPQATPPPAPFQSPTTQRNQRLKAANFKSEPRWDFEEKYSFEIGGLQTTCPDSVKIKASKSLWLQKLFLPNLTLFLDSRHFNQSEWDRLEHFAPPFGFMELNYSLVQKVVTRFPPVPQQQLLLASLPAGSLRCITCAVVGNGGILNNSHMGQEIDSHDYVFRLSGALIKGYEQDVGTRTSFYGFTAFSLTQSLLILGNRGFKNVPLGKDVRYLHFLEGTRDYEWLEALLMNQTVMSKNLFWFRHRPQEAFREALHMDRYLLLHPDFLRYMKNRFLRSKTLDGAHWRIYRPTTGALLLLTALQLCDQVSAYGFITEGHERFSDHYYDTSWKRLIFYINHDFKLEREVWKRLHDEGIIRLYQRPGPGTAKAKN

SEQ ID NO: 5114 - protein, 244 aa, Homo Sapiens
MVYKTLFALCILTAGWRVQSLPTSAPLSVSLPTNIVPPTTIWTSSPQNTDADTASPSNGTHNNSVLPVTASAPTSLLPKNISIESREEEITSPGSNWEGTNTDPSPSGFSSTSGGVHLTTTLEEHSLGTPEAGVAATLSQSAAEPPTLISPQAPASSPSSLSTSPPEVFSASVTTNHSSTVTSTQPTGAPTAPESPTEESSSDHTPTSHATAEPVPQEKTPPTTVSGKVMCELIDMETPPPFPG

SEQ ID NO: 5115 - protein, 1371 aa, Homo Sapiens
AASASSTNLIHLSSKGHISPAKDTSLQQRTPAEMSPVLHFYVRPSGHEGAASGHTRRKLQGKLPELQGVETELCYNVNWTAEALPSAEETKKLMWLFGCPLLLDDVARESWLLPGSNDLLLEVGPRLNFSTPTSTNIVSVCRATGLGPVDRVETTRRYRLSFAHPPSAEVEAIALATLHDRMTEQHFPHPIQSFSPESMPEPLNGPINILGEGRLALEKANQELGLALDSWDLDFYTKRFQELQRNPSTVEAFDLAQSNSEHSRHWFFKGQLHVDGQKLVHSLFESIMSTQESSNPNNVLKFCDNSSAIQGKEVRFLRPEDPTRPSRFQQQQGLRHVVFTAETHNFPTGVCPFSGATTGTGGRIRDVQCTGRGAHVVAGTAGYCFGNLHIPGYNLPWEDLSFQYPGNFARPLEVAIEASNGASDYGNKFGEPVLAGFARSLGLQLPDGQRREWIKPIMFSGGIGSMEADHISKEAPEPGMEVVKVGGPVYRIGVGGGAASSVQVQGDNTSDLDFGAVQRGDPEMEQKMNRVIRACVEAPKGNPICSLHDQGAGGNGNVLKELSDPAGAIIYTSRFQLGDPTLNALEIWGAEYQESNALLLRSPNRDFLTHVSARERCPACFVGTITGDRRIVLVDDRECPVRRNGQGDAPPTPPPTPVDLELEWVLGKMPRKEFFLQRKPPMLQPLALPPGLSVHQALERVLRLPAVASKRYLTNKVDRSVGGLVAQQQCVGPLQTPLADVAVVALSHEELIGAATALGEQPVKSLLDPKVAARLAVAEALTNLVFALVTDLRDVKCSGNWMWAAKLPGEGAALADACEAMVAVMAALGVAVDGGKDSLSMAARVGTETVRAPGSLVISAYAVCPDITATVTPDLKHPEGRGHLLYVALSPGQHRLGGTALAQCFSQLGEHPPDLDLPENLVRAFSITQGLLKDRLLCSGHDVSDGGLVTCLLEMAFAGNCGLQVDVPVPRVDVLSVLFAEEPGLVLEVQEPDLAQVLKRYRDAGLHCLELGHTGEAGPHAMVRVSVNGAVVLEEPVGELRALWEETSFQLDRLQAEPRCVAEEERGLRERMGPSYCLPPTFPKASVPREPGGPSPRVAILREEGSNGDREMADAFHLAGFEVWDVTMQDLCSGAIGLDTFRGVAFVGGFSYADVLGSAKGWAAAVTFHPRAGAELRRFRKRPDTFSLGVCNGCQLLALLGWVGGDPNEDAAEMGPDSQPARPGLLLRHNLSGRYESRWASVRVGPGPALMLRGMEGAVLPVWSAHGEGYVAFSSPELQAQIEARGLAPLHWADDDGNPTEQYPLNPNGSPGGVAGICSCDGRHLAVMPHPERAVRPWQWAWRPPPFDTLTTSPWLQLSINARNWTLEGSC

SEQ ID NO: 5116 - protein, 772 aa, Homo Sapiens
MGDEDDDESCAVELRITEANLTGHEEKVSVENFELLKVLGTGAYGKVFLVRKAGGHDAGKLYAMKVLRKAALVQRAKTQEHTRTERSVLELVRQAPFLVTLHYAFQTDAKLHLILDYVSGGEMFTHLYQRQYFKEAEVRVYGGEIVLALEHLHKLGIIYRDLKLENVLLDSEGHIVLTDFGLSKEFLTEEKERTFSFCGTIEYMAPEIIRSKTGHGKAVDWWSLGILLFELLTGASPFTLEGERNTQAEVSRRILKCSPPFPPRIGPVAQDLLQRLLCKDPKKRLGAGPQGAQEVRNHPFFQGLDWVALAARKIPAPFRPQIRSELDVGNFAEEFTRLEPVYSPPGSPPPGDPRIFQGYSFVAPSILFDHNNAVMTDGLEAPGAGDRPGRAAVARSAMMQDSPFFQQYELDLREPALGQGSFSVCRRCRQRQSGQEFAVKILSRRLEANTQREVAALRLCQSHPNVVNLHEVHHDQLHTYLVLELLRGGELLEHIRKKRHFSESEASQILRSLVSAVSFMHEEAGVVHRDLKPENILYADDTPGAPVKIIDFGFARLRPQSPGVPMQTPCFTLQYAAPELLAQQGYDESCDLWSLGVILYMMLSGQVPFQGASGQGGQSQAAEIMCKIREGRFSLDGEAWQGVSEEAKELVRGLLTVDPAKRLKLEGLRGSSWLQDGSARSSPPLRTPDVLESSGPAVRSGLNATFMAFNRGKREGFFLKSVENAPLAKRRKQKLRSATASRRGSPAPANPGRAPVASKGAPRRANGPLPPS

SEQ ID NO: 5117 - protein, 64 aa, Homo Sapiens
MRVLYLLFSFLFIFLMPLPGVFGGIGDPVTCLKSGAICHPVFCPRRYKQIGTCGLPGTKCCKKP

SEQ ID NO: 5118 - protein, 257 aa, Homo Sapiens
MVQLRPRASRAPASAEAMVDEGQLASEEEEAEHGLLLGQPSSGAAAEPLEEDEEGDDEFDDEAPEELTFASAQAEAREEERRVRETVRRDKTLLKEKRKRREELFIEQKKRKLLPDTILEKLTTASQTNIKKSPGKVKEVNLQKKNEDCEKGNDSKKVKVQKVQSVSQNKSYLAVRLKDQDLRDSRQQAAQAFIHNSLYGPGTNRTTVNKFLSLANKRLPVKRAAVQFLNNAWGIQKKQNAKRFKRRWMVRKMKTKK

SEQ ID NO: 5119 - protein, 1331 aa, Homo Sapiens
MQAAPRAGCGAALLLWIVSSCLCRAWTAPSTSQKCDEPLVSGLPHVAFSSSSSISGSYSPGYAKINKRGGAGGWSPSDSDHYQWLQVDFGNRKQISAIATQGRYSSSDWVTQYRMLYSDTGRNWKPYHQDGNIWAFPGNINSDGVVRHELQHPIIARYVRIVPLDWNGEGRIGLRIEVYGCSYWADVINFDGHVVLPYRFRNKKMKTLKDVIALNFKTSESEGVILHGEGQQGDYITLELKKAKLVLSLNLGSNQLGPIYGHTSVMTGSLLDDHHWHSVVIERQGRSINLTLDRSMQHFRTNGEFDYLDLDYEITFGGIPFSGKPSSSSRKNFKGCMESINYNGVNITDLARRKKLEPSNVGNLSFSCVEPYTVPVFFNATSYLEVPGRLNQDLFSVSFQFRTWNPNGLLVFSHFADNLGNVEIDLTESKVGVHINITQTKMSQIDISSGSGLNDGQWHEVRFLAKENFAILTIDGDEASAVRTNSPLQVKTGEKYFFGGFLNQMNNSSHSVLQPSFQGCMQLIQVDDQLVNLYEVAQRKPGSFANVSIDMCAIIDRCVPNHCEHGGKCSQTWDSFKCTCDETGYSGATCHNSIYEPSCEAYKHLGQTSNYYWIDPDGSGPLGPLKVYCNMTEDKVWTIVSHDLQMQTPVVGYNPEKYSVTQLVYSASMDQISAITDSAEYCEQYVSYFCKMSRLLNTPDGSPYTWWVGKANEKHYYWGGSGPGIQKCACGIERNCTDPKYYCNCDADYKQWRKDAGFLSYKDHLPVSQVVVGDTDRQGSEAKLSVGPLRCQGDRNYWNAASFPNPSSYLHFSTFQGETSADISFYFKTLTPWGVFLENMGKEDFIKLELKSATEVSFSFDVGNGPVEIVVRSPTPLNDDQWHRVTAERNVKQASLQVDRLPQQIRKAPTEGHTRLELYSQLFVGGAGGQQGFLGCIRSLRMNGVTLDLEERAKVTSGFISGCSGHCTSYGTNCENGGKCLERYHGYSCDCSNTAYDGTFCNKDVGAFFEEGMWLRYNFQAPATNARDSSSRVDNAPDQQNSHPDLAQEEIRFSFSTTKAPCILLYISSFTTDFLAVLVKPTGSLQIRYNLGGTREPYNIDVDHRNMANGQPHSVNITRHEKTIFLKLDHYPSVSYHLPSSSDTLFNSPKSLFLGKVIETGKIDQEIHKYNTPGFTGCLSRVQFNQIAPLKAALRQTNASAHVHIQGELVESNCGASPLTLSPMSSATDPWHLDHLDSASADFPYNPGQGQAIRNGVNRNSAIIGGVIAVVIFTILCTLVFLIRYMFRHKGTYHTNEAKGAESAESADAAIMNNDPNFTETIDESKKEWLI

SEQ ID NO: 5120 - protein, 274 aa, Homo Sapiens [sequence omitted]

SEQ ID NO: 5121 - protein, 312 aa, Homo Sapiens
MHPHHQETLKKNRVVLAKQLLLSELLEHLLEKDIITLEMRELIQAKVGSFSQNVELLNLLPKRGPQAFDAFCEALRETKQGHLEDMLLTTLSGLQHVLPPLSCDYDLSLPFPVCESCPLYKKLRLSTDTVEHSLDNKDGPVCLQVKPCTPEFYQTHFQLAYRLQSRPRGLALVLSNVHFTGEKELEFRSGGDVDHSTLVTLFKLLGYDVHVLCDQTAQEMQEKLQNFAQLPAHRVTDSCIVALLSHGVEGAIYGVDGKLLQLQEVFQLFDNANCPSLQNKPKMFFIQACRGGAIGSLGHLLLFTAATASLAL

SEQ ID NO: 5122 - protein, 301 aa, Homo Sapiens
MASAARELVIQRLSLVRSLCESEEQRLLEQVHGEEERAHQSILTQRVHWAEALQKLDTIRTGLVGMLTHLDDLQLIQKEQEIFERTEEAEGILDPQESEMLNFNEKCTRSPLLTQLWATAVLGSLSGTEDIRIDERTVSPFLQLSDDRKTLTFSTKKSKACADGPERFDHWPNALAATSFQNGLHAWMVNVQNSCAYKVGVASGHLPRKGSGSDCRLGHNAFSWVFSRYDQEFRFSHNGQHEPLGLLRGPAQLGVVLDLQVQELLFYEPASGIVLCAHHVSFPGPLFPVFAVADQTISIVR

SEQ ID NO: 5123 - protein, 361 aa, Homo Sapiens
MAMNYNAKDEVDGGPPCAPGGTAKTRRPDNTAFKQQRLPAWQPILTAGTVLPIFFIIGLIFIPIGIGIFVTSNNIREIEIDYTGTEPSSPCNKCLSPDVTPCFCTINFTLEKSFEGNVFMYYGLSNFYQNHRRYVKSRDDSQLNGDSSALLNPSKECEPYRRNEDKPIAPCGAIANSMFNDTLELFLIGNDSYPIPIALKKKGIAWWTDKNVKFRNPPGGDNLEERFKGTTKPVNWLKPVYMLDSDPDNNGFINEDFIVWMRTAALPTFRKLYRLIERKSDLHPTLPAGRYSLNVTYNYPVHYFDGRKRMILSTISWMGGKNPFLGIAYIAVGSISFLLGVVLLVINHKYRNSSNTADITI

SEQ ID NO: 5124 - protein, 1172 aa, Homo Sapiens
MVWRLVLLALWVWPSTQAGHQDKDTTFDLFSISNINRKTIGAKQFRGPDPGVPAYRFVRFDYIPPVNADDLSKITKIMRQKEGFFLTAQLKQDGKSRGTLLALEGPGLSQRQFEIVSNGPADTLDLTYWIDGTRHVVSLEDVGLADSQWKNVTVQVAGETYSLHVGCDLIGPVALDEPFYEHLQAEKSRMYVAKGSARESHFRGLLQNVHLVFENSVEDILSKKGCQQGQGAEINAISENTETLRLGPHVTTEYVGPSSERRPEVCERSCEELGNMVQELSGLHVLVNQLSENLKRVSNDNQFLWELIGGPPKTRNMSACWQDGRFFAENETWVVDSCTTCTCKKFKTICHQITCPPATCASPSFVEGECCPSCLHSVDGEEGWSPWAEWTQCSVTCGSGTQQRGRSCDVTSNTCLGPSIQTRACSLSKCDTRIRQDGGWSHWSPWSSCSVTCGVGNITRIRLCNSPVPQMGGKNCKGSGRETKACQGAPCPIDGRWSPWSPWSACTVTCAGGIRERTRVCNSPEPQYGGKACVGDVQERQMCNKRSCPVDGCLSNPCFPGAQCSSFPDGSWSCGFCPVGFLGNGTHCEDLDECALVPDICFSTSKVPRCVNTQPGFHCLPCPPRYRGNQPVGVGLEAAKTEKQVCEPENPCKDKTHNCHKHAECIYLGHFSDPMYKCECQTGYAGDGLICGEDSDLDGWPNLNLVCATNATYHCIKDNCPHLPNSGQEDFDKDGIGDACDDDDDNDGVTDEKDNCQLLFNPRQADYDKDEVGDRCDNCPYVHNPAQIDTDNNGEGDACSVDIDGDDVFNERDNCPYVYNTDQRDTDGDGVGDHCDNCPLVHNPDQTDVDNDLVGDQCDNNEDIDDDGHQNNQDNCPYISNANQADHDRDGQGDACDPDDDNDGVPDDRDNCRLVFNPDQEDLDGDGRGDICKDDFDNDNIPDIDDVCPENNAISETDFRNFQMVPLDPKGTTQIDPNWVIRHQGKELVQTANSDPGIAVGFDEFGSVDFSGTFYVNTDRDDDYAGFVFGYQSSSRFYVVMWKQVTQTYWEDQPTRAYGYSGVSLKVVNSTTGTGEHLRNALWHTGNTPGQVRTLWHDPRNIGWKDYTAYRWHLTHRPKTGYIRVLVHEGKQVMADSGPIYDQTYAGGRLGLFVFSQEMVYFSDLKYECRDI

SEQ ID NO: 5125 - protein, 816 aa, Homo Sapiens
MSSECDGGSKAVMNGLAPGSNGQDKDMDPTKICTGKGAVTLRASSSYRETPSSSPASPQETRQHESKPGLEPEPSSADEWRLSSSADANGNAQPSSLAAKGYRSVHPNLPSDKSQDATSSSAAQPEVIVVPLYLVNTDRGQEGTARPPTPLGPLGCVPTIPATASAASPLTFPTLDDFIPPHLQRWPHHSQPARASGSFAPISQTPPSFSPPPPLVPPAPEDLRRVSEPDLTGAVSSTDSSPLLNEVSSSLIGTDSQAFPSVSKPSSAYPSTTIVNPTIVLLQHNREQQKRLSSLSDPVSERRVGEQDSAPTQEKPTSPGKAIEKRAKDDSRRVVKSTQDLSDVSMDEVGIPLRNTERSKDWYKTMFKQIHKLNRDDDSDLYSPRYSFSEDTKSPLSVPRSKSEMSYIDGEKVVKRSATLPLPARSSSLKSSSERNDWEPPDKKVDTRKYRAEPKSIYEYQPGKSSVLTNEKMSSAISPTPEISSETPGYIYSSNFHAVKRESDGAPGDLTSLENERQIYKSVLEGGDIPLQGLSGLKRPSSSASTKDSESPRHFIPADYLESTEEFIRRRHDDKEMRPARAKFDFKAQTLKELPLQKGDIVYIYKQIDQNWYEGEHHGRVGIFPRTYIELLPPAEKAQPKKLTPVQVLEYGEAIAKFNFNGDTQVEMSFRKGERITLLRQVDENWYEGRIPGTSRQGIFPITYVDVIKRPLVKNPVDYMDLPFSSSPSRSATASPQQPQAQQRRVTPDRSQTSQDLFSYQALYSYIPQNDDELELRDGDIVDVMEKCDDGWFVGTSRRTKQFGTFPGNYVKPLYL

SEQ ID NO: 5126 - protein, 406 aa, Homo Sapiens [sequence omitted]

SEQ ID NO: 5127 - protein, 739 aa, Homo Sapiens
MPGKMVVILGASNILWIMFAASQAFKIETTPESRYLAQIGDSVSLTCSTTGCESPFFSWRTQIDSPLNGKVTNEGTTSTLTMNPVSFGNEHSYLCTATCESRKLEKGIQVEIYSFPKDPEIHLSGPLEAGKPITVKCSVADVYPFDRLEIDLLKGDHLMKSQEFLEDADRKSLETKSLEVTFTPVIEDIGKVLVCRAKLHIDEMDSVPTVRQAVKELQVYISPKNTVISVNPSTKLQEGGSVTMTCSSEGLPAPEIFWSKKLDNGNLQHLSGNATLTLIAMRMEDSGIYVCEGVNLIGKNRKEVELIVQEKPFTVEISPGPRIAAQIGDSVMLTCSVMGCESPSFSWRTQIDSPLSGKVRSEGTNSTLTLSPVSFENEHSYLCTVTCGHKKLEKGIQVELYSFPRDPEIEMSGGLVNGSSVTVSCKVPSVYPLDRLEIELLKGETILENIEFLEDTDMKSLENKSLEMTFIPTIEDTGKALVCQAKLHIDDMEFEPKQRQSTQTLYVNVAPRDTTVLVSPSSILEEGSSVNMTCLSQGFPAPKILWSRQLPNGELQPLSENATLTLISTKMEDSGVYLCEGINQAGRSRKEVELIIQVTPKDIKLTAFPSESVKEGDTVIISCTCGNVPETWIILKKKAETGDTVLKSIDGAYTIRKAQLKDAGVYECESKNKVGSQLRSLTLDVQGRENNKDYFSPELLVLYFASSLIIPAIGMIIYFARKANMKGSYSLVEAQKSKV

SEQ ID NO: 5128 - protein, 714 aa, Homo Sapiens
MPAAAGDGLLGEPAAPGGGGGAEDAARPAAACEGSFLPAWVSGVPRERLRDFQHHKRVGNYLIGSRKLGEGSFAKVREGLHVLTGEKVAIKVIDKKRAKKDTYVTKNLRREGQIQQMIRHPNITQLLDILETENSYYLVMELCPGGNLMHKIYEKKRLEESEARRYIRQLISAVEHLHRAGVVHRDLKIENLLLDEDNNIKLIDFGLSNCAGILGYSDPFSTQCGSPAYAAPELLARKKYGPKIDVWSIGVNMYAMLTGTLPFTVEPFSLRALYQKMVDKEMNPLPTQLSTGAISFLRSLLEPDPVKRPNIQQALANRWLNENYTGKVPCNVTYPNRISLEDLSPSVVLHMTEKLGYKNSDVINTVLSNRACHILAIYFLLNKKLERYLSGKSDIQDSLCYKTRLYQIEKYRAPKESYEASLDTWTRDLEFHAVQDKKPKEQEKRGDFLHRPFSKKLDKNLPSHKQPSGSLMTQIQNTKALLKDRKASKSSFPDKDSFGCRNIFRKTSDSNCVASSSMEFIPVPPPRTPRIVKKPEPHQPGPGSTGIPHKEDPLMLDMVRSFESVDRDDHVEVLSPSHHYRILNSPVSLARRNSSERTLSPGLPSGSMSPLHTPLHPTLVSFAHEDKNSPPKEEGLCCPPPVPSNGPMQPLGSPNCVKSRGRFPMMGIGQMLRKRHQSLQPSADRPLEASLPPLQPLAPVNLAFDMADGVKTQC

SEQ ID NO: 5129 - protein, 479 aa, Homo Sapiens
MSDGFDRAPGAGRGRSRGLGRGGGGPEGGGFPNGAGPAERARHQPPQPKAPGFLQPPPLRQPRTTPPPGAQCEVPASPQRPSRPGALPEQTRPLRAPPSSQDKIPQQNSESAMAKPQVVVAPVLMSKLSVNAPEFYPSGYSSSYTESYEDGCEDYPTLSEYVQDFLNHLTEQPGSFETEIEQFAETLNGCVTTDDALQELVELIYQQATSIPNFSYMGARLCNYLSHHLTISPQSGNFRQLLLQRCRTEYEVKDQAAKGDEVTRKRFHAFVLFLGELYLNLEIKGTNGQVTRADILQVGLRELLNALFSNPMDDNLICAVKLLKLTGSVLEDAWKEKGKMDMEEIIQRIENVVLDANCSRDVKQMLLKLVELRSSNWGRVHATSTYREATPENDPNYFMNEPTFYTSDGVPFTAADPDYQEKYQELLEREDFFPDYEENGTDLSGAGDPYLDDIDDEMDPEIEEAYEKFCLESERKRKQ

SEQ ID NO: 5130 - protein, 564 aa, Homo Sapiens
MASTSTTIRSHSSSRRGFSANSARLPGVSRSGFSSVSVSRSRGSGGLGGACGGAGFGSRSLYGLGGSKRISIGGGSCAISGGYGSRAGGSYGFGGAGSGFGFGGGAGIGFGLGGGAGLAGGFGGPGFPVCPPGGIQEVTVNQSLLTPLNLQIDPTIQRVRAEEREQIKTLNNKFASFIDKVRFLEQQNKVLETKWTLLQEQGTKTVRQNLEPLFEQYINNLRRQLDSIVGERGRLDSELRGMQDLVEDFKNKYEDEINKRTAAENEFVTLKKDVDAAYMNKVELQAKADTLTDEINFLRALYDAELSQMQTHISDTSVVLSMDNNRNLDLDSIIAEVKAQYEEIAQRSRAEAESWYQTKYEELQVTAGRHGDDLRNTKQEIAEINRMIQRLRSEIDHVKKQCANLQAAIADAEQRGEMALKDAKNKLEGLEDALQKAKQDLARLLKEYQELMNVKLALDVEIATYRKLLEGEECRLNGEGVGQVNISVVQSTVSSGYGGASGVGSGLGLGGGSSYSYGSGLGVGGGFSSSSGRAIGGGLSSVGGGSSTIKYTTTSSSSRKSYKH

SEQ ID NO: 5131 - protein, 764 aa, Homo Sapiens
MLLFVLTCLLAVFPAISTKSPIFGPEEVNSVEGNSVSITCYYPPTSVNRHTRKYWCRQGARGGCITLISSEGYVSSKYAGRANLTNFPENGTFVVNIAQLSQDDSGRYKCGLGINSRGLSFDVSLEVSQGPGLLNDTKVYTVDLGRTVTINCPFKTENAQKRKSLYKQIGLYPVLVIDSSGYVNPNYTGRIRLDIQGTGQLLFSVVINQLRLSDAGQYLCQAGDDSNSNKKNADLQVLKPEPELVYEDLRGSVTFHCALGPEVANVAKFLCRQSSGENCDVVVNTLGKRAPAFEGRILLNPQDKDGSFSVVITGLRKEDAGRYLCGAHSDGQLQEGSPIQAWQLFVNEESTIPRSPTVVKGVAGSSVAVLCPYNRKESKSIKYWCLWEGAQNGRCPLLVDSEGWVKAQYEGRLSLLEEPGNGTFTVILNQLTSRDAGFYWCLTNGDTLWRTTVEIKIIEGEPNLKVPGNVTAVLGETLKVPCHFPCKFSSYEKYWCKWNNTGCQALPSQDEGPSKAFVNCDENSRLVSLTLNLVTRADEGWYWCGVKQGHFYGETAAVYVAVEERKAAGSRDVSLAKADAAPDEKVLDSGFREIENKAIQDPRLFAEEKAVADTRDQADGSRASVDSGSSEEQGGSSRALVSTLVPLGLVLAVGAVAVGVARARHRKNVDRVSIRSYRTDISMSDFENSREFGANDNMGASSITQETSLGGKEEFVATTESTTETKEPKKAKRSSKEEAEMAYKDFLLQSSTVAAEAQDGPQEA

SEQ ID NO: 5132 - protein, 802 aa, Homo Sapiens
MAARGRRAWLSVLLGLVLGFVLASRLVLPRASELKRAGPRRRASPEGCRSGQAAASQAGGARGDARGAQLWPPGSDPDGGPRDRNFLFVGVMTAQKYLQTRAVAAYRTWSKTIPGKVQFFSSEGSDTSVPIPVVPLRGVDDSYPPQKKSFMMLKYMHDHYLDKYEWFMRADDDVYIKGDRLENFLRSLNSSEPLFLGQTGLGTTEEMGKLALEPGENFCMGGPGVIMSREVLRRMVPHIGKCLREMYTTHEDVEVGRCVRRFAGVQCVWSYEMQQLFYENYEQNKKGYIRDLHNSKIHQAITLHPNKNPPYQYRLHSYMLSRKISELRHRTIQLHREIVLMSKYSNTEIHKEDLQLGIPPSFMRFQPRQREEILEWEFLTGKYLYSAVDGQPPRRGMDSAQREALDDIVMQVMEMINANAKTRGRIIDFKEIQYGYRRVNPMYGAEYILDLLLLYKKHKGKKMTVPVRRHAYLQQTFSKIQFVEHEELDAQELAKRINQESGSLSFLSNSLKKLVPFQLPGSKSEHKEPKDKKINILIPLSGRFDMFVRFMGNFEKTCLIPNQNVKLVVLLFNSDSNPDKAKQVELMRDYRIKYPKADMQILPVSGEFSRALALEVGSSQFNNESLLFFCDVDLVFTTEFLQRCRANTVLGQQIYFPIIFSQYDPKIVYSGKVPSDNHFAFTQKTGFWRNYGFGITCIYKGDLVRVGGFDVSIQGWGLEDVDLFNKVVQAGLKTFRSQEVGVVHVHHPVFCDPNLDPKQYKMCLGSKASTYGSTQQLAEMWLEKNDPSYSKSSNNNGSVRTA

SEQ ID NO: 5133 - protein, 1770 aa, Homo Sapiens
SFGIILSIDLKTCTTTRVSKKHGKLITFLRTFMKSRPTKQKLKQRGILKERVFGCDLGEHLLNSGFEVPQVLQSCTAFIERYGIVDGIYRLSGVASNIQRLRHEFDSEHVPDLTKEPYVQDIHSVGSLCKLYFRELPNPLLTYQLYEKFSDAVSAATDEERLIKIHDVIQQLPPPHYRTLEFLMRHLSLLADYCSITNMHAKNLAIVWAPNLLRSKQIESACFSGTAAFMEVRIQSVVVEFILNHVDVLFSGRISMAMQEGAASLSRPKSLLVSSPSTKLLTLEEAQARTQAQVNSPIVTENKYIEVGEGPAALQGKFHTIIEFPLERKRPQNKMKKSPVGSWRSFFNLGKSSSVSKRKLQRNESEPSEMKAMALKGGRAEGTLRSAKSEESLTSLHAVDGDSKLFRPRRPRSSSDALSASFNGEMLGNRCNSYDNLPHDNESEEEGGLLHIPALMSPHSAEDVDLSPPDIGVASLDFDPMSFQCSPPKAESECLESGASFLDSPGYSKDKPSANKKDAETGSSQCQTPGSTASSEPVSPLQEKLSPFFTLDLSPTEDKSSKPSSFTEKVVYAFSPKIGRKLSKSPSMSISEPISVTLPPRVSEVIGTVSNTTAQNASSSTWDKCVEERDATNRSPTQIVKMKTNETVAQEAYESEVQPLDQVAAEEVELPGKEDQSVSSSQSKAVASGQTQTGAVTHDPPQDSVPVSSVSLIPPPPPPKNVARMLALALAESAQQASTQSLKRPGTSQAGYTNYGDIAVATTEDNLSSSYSAVALDKAYFQTDRPAEQFHLQNNAPGNCDHPLPETTATGDPTHSNTTESGEQHHQVDLTGNQPHQAYLSGDPEKARITSVPLDSEKSDDHVSFPEDQSGKNSMPTVSFLDQDQSPPRFYSGDQPPSYLGASVDKLHHPLEFADKSPTPPNLPSDKIYPPSGSPEENTSTATMTYMTTTPATAQMSTKEASWDVAEQPTTADFAAATLQRTHRTNRPLPPPPSQRSAEQPPVVGQVQAATNIGLNNSHKVQGVVPVPERPPEPRAMDDPASAFISDSGAAAAQCPMATAVQPGLPEKVRDGARVPLLHLRAESVPAHPCGFPAPLPPTRMMESKMIAAIHSSSADATSSSNYHSFVTASSTSVDDALPLPLPVPQPKHASQKTVYSSFARPDVTTEPFGPDNCLHFNMTPNCQYRPQSVPPHHNKLEQHQVYGARSEPPASMGLRYNTYVAPGRNASGHHSKPCSRVEYVSSLSSSVRNTCYPEDIPPYPTIRRVQSLHAPPSSMIRSVPISRTEVPPDDEPAYCPRPLYQYKPYQSSQARSDYHVTQLQPYFENGRVHYRYSPYSSSSSSYYSPDGALCDVDAYGTVQLRPLHRLPNRDFAFYNPRLQGKSLYSYAGLAPRPRANVTGYFSPNDHNVVSMPPAADVKHTYTSWDLEDMEKYRMQSIRRESRARQKVKGPVMSQYDNMTPAVQDDLGGIYVIHLRSKSDPGKTGLLSVAEGKESRHAAKAISPEGEDRFYRRHPEAEMDRAHHHGGHGSTQPEKPSLPQKQSSLRSRKLPDMGCSLPEHRAHQEASHRQFCESKNGPPYPQGAGQLDYGSKGIPDTSEPVSYHNSGVKYAASGQESLRLNHKEVRLSKEMERPWVRQPSAPEKHSRDCYKEEEHLTQSIVPPPKPERSHSLKLHHTQNVERDPSVLYQYQPHGKRQSSVTVVSQYDNLEDYHSLPQHQRGVFGGGGMGTYVPPGFPHPQSRTYATALGQGAFLPAELSLQHPETQIHAE

SEQ ID NO: 5134 - protein, 676 aa, Homo Sapiens
MAEFRVRVSTGEAFGAGTWDKVSVSIVGTRGESPPLPLDNLGKEFTAGAEEDFQVTLPEDVGRVLLLRVHKAPPVLPLLGPLAPDAWFCRWFQLTPPRGGHLLFPCYQWLEGAGTLVLQEGTAKVSWADHHPVLQQQRQEELQARQEMYQWKAYNPGWPHCLDEKTVEDLELNIKYSTAKNANFYLQAGSAFAEMKIKGLLDRKGLWRSLNEMKRIFNFRRTPAAEHAFEHWQEDAFFASQFLNGLNPVLIRRCHYLPKNFPVTDAMVASLLGPGTSLQAELEKGSLFLVDHGILSGIQTNVINGKPQFSAAPMTLLYQSPGCGPLLPLAIQLSQTPGPNSPIFLPTDDKWDWLLAKTWVRNAEFSFHEALTHLLHSHLLPEVFTLATLRQLPHCHPLFKLLIPHTRYTLHINTLARELLIVPGQVVDRSTGIGIEGFSELIQRNMKQLNYSLLCLPEDIRTRGVEDIPGYYYRDDGMQIWGAVERFVSEIIGIYYPSDESVQDDRELQAWVREIFSKGFLNQESSGIPSSLETREALVQYVTMVIFTCSAKHAAVSAGQFDSCAWMPNLPPSMQLPPPTSKGLATCEGFIATLPPVNATCDVILALWLLSKEPGDQRPLGTYPDEHFTEEAPRRSIATFQSRLAQISRGIQERNRGLVLPYTYLDPPLIENSVSI

SEQ ID NO: 5135 - protein, 1112 aa, Homo Sapiens
KNPAVQFLYQKLIGWLNEDQRKDFGFLVDILYSALRCCDNDMERKKVLDDLTKVDLKWNSLLKIIEKACPSSDKHALVTPWLKGDILGEKLVNLADCLCNEDLESRVSSESHFSERWTLLSLVLSQHVKNDYLIGDVYVERIIVRLHETLFKTKKLSEAESSDSSVSFICDVAYNYFSSAKGCLLMPSSEDLLLTLFQLCAQSKEKTHLPDFLICKLKNTWLSGVNLLVHQTDSSYKESTFLHLSALWLKNQVQASSLDINSLQVLLSAVDDLLNTLLESEDSYLMGVYIGSVMPNDSEWEKMRQSLPMQWLHRPLLEGRLSLNYECFKTDFKEQDIKTLPSHLCTSALLSKMVLIALRKETVLENNELEKIIAELLYSLQWCEELDNPPIFLIGFCEILQKMNITYDNLRVLGNTSGLLQLLFNRSREHGTLWSLIIAKLILSRSISSDEVKPHYKRKESFFPLTEGNLHTIQSLCPFLSKEEKKEFSAQCIPALLGWTKKDLCSTNGGFGHLAIFNSCLQTKSIDDGELLHGILKIIISWKKEHEDIFLFSCNLSEASPEVLGVNIEIIRFLSLFLKYCSSPLAESEWDFIMCSMLAWLETTSENQALYSIPLVQLFACVSCDLACDLSAFFDSTTLDTIGNLPVNLISEWKEFFSQGIHSLLLPILVTVTGENKDVSETSFQNAMLKPMCETLTYISKEQLLSHKLPARLVADQKTNLPEYLQTLLNTLAPLLLFRARPVQIAVYHMLYKLMPELPQYDQDNLKSYGDEEEEPALSPPAALMSLLSIQEDLLENVLGCIPVGQIVTIKPLSEDFCYVLGYLLTWKLILTFFKAASSQLRALYSMYLRKTKSLNKLLYHLFRLMPENPTYAETAVEVPNKDPKTFFTEELQLSIRETTMLPYHIPHLACSVYHMTLKDLPAMVRLWWNSSEKRVFNIVDRFTSKYVSSVLSFQEISSVQTSTQLFNGMTVKARATTREVMATYTIEDIVIELIIQLPSNYPLGSIIVESGKRVGVAVQQWRNWMLQLSTYLTHQNGSIMEGLALWKNNVDKRFEGVEDCMICFSVIHGFNYSLPKKACRTCKKKFHSACLYKWFTSSNKSTCPLCRETFF

SEQ ID NO: 5136 - protein, 1723 aa, Homo Sapiens
QPCMAAAPSALLLLPPFPVLSTYRLQSRSRPSAPETDDSRVGGIMRGEKNYYFRGAAGDHGSCPTTTSPLASALLMPSEAVSSSWSESGGGLSGGDEEDTRLLQLLRTARDPSEAFQALQAALPRRGGRLGFPRRKEALYRALGRVLVEGGSDEKRLCLQLLSDVLRGQGEAGQLEEAFSLALLPQLVVSLREENPALRKDALQILHICLKRSPGEVLRTLIQQGLESTDARLRASTALLLPILLTTEDLLLGLDLTEVIISLARKLGDQETEEESETAFSALQQIGERLGQDRFQSYISRLPSALRRHYNRRLESQFGSQVPYYLELEASGFPEDPLPCAVTLSNSNLKFGIIPQELHSRLLDQEDYKNRTQAVEELKQVLGKFNPSSTPHSSLVGFISLLYNLLDDSNFKVVHGTLEVLHLLVIRLGEQVQQFLGPVIAASVKVLADNKLVIKQEYMKIFLKLMKEVGPQQVLCLLLKHLKHKHSRVREEVVNICICSLLTYPSEDFDLPKLSFDLAPALVDSKRRVRQAALEAFAVLASSMGSGKTSILFKAVDTVELQDNGDGVMNAVQARLARKTLPRLTEQGFVEYAVLMPSSAGGRSNHLAHGADTDWLLAGNRTQSAHCHCGDHVRDSMHIYGSYSPTICTRRVLSAGKGKNKLPWENEQPGIMGENQTSTSKDIEQFSTYDFIPSAKLKLSQGMPVNDDLCFSRKRVSRNLFQNSRDFNPDCLPLCAAGTTGTHQTNLSGKCAQLGFSQICGKTGSVGSDLQFLGTTSSHQEKVYASLNFGSKTQQTFGSQTECTSSNGQNPSPGAYILPSYPVSSPRTSPKHTSPLIISPKKSQDNSVNFSNSWPLKSFEGLSKPSPQKKLVSQKSSDPTGRNHGENSQEKPPVQLTPALVRSPSSRRGLNGTKPVPPIPRGISLLPDKADLSTVGHKKKEPDDIWKCEKDSLPIDLSELNFKDKDLDQEEMHSSLRSLRNSAAKKRAKLSGSTLDLESPDSAMKLDLTMDSPSLSSSPNINSYSESGVYSQESLTSSLSTTPQGKRIMSDIFPTFGSKPCPTRLSSAKKKISHIAEQSPSAGSSSNPQQISSFDFTTTKALSEDSVVVVGKGVFGSLSSAPATCSQSVISSVENGDTFSIKQSIEPPSGIYGRSVQQNISSYLDVENEKDAKVSISKSTYNKMRQKRKEEKELFHNKDCEKKEKNSWERMRHTGTEKMASESETPTGAISQYKERMPSVTHSPEIMDLSELRPFSKPEIALTEALRLLADEDWEKKIEGLNFIRCLAAFHSEILNTKLHETNFAVVQEVKNLRSGVSRAAVVCLSDLFTYLKKSMDQELDTTVKVLLHKAGESNTFIREDVDKALRAMVNNVTPARAVVSLINGGQRYYGRKMLFFMMCHPNFEKMLEKYVPSKDLPYIKDSVRNLQQKGLGEIPLDTPSAKGRRSHTGSVGNTRSSSVSRDAFNSAERAVTEVREVTRKSVPRNSLESAEYLKLITGLLNAKDFRDRINGIKQLLSDTENNQDLVVGNIVKIFDAFKSRLHDSNSKVNLVALETMHKMIPLLRDHLSPIINMLIPAIVDNNLNSKNPGIYAAATNVVQALSQHVDNYLLLQPFCTKAQFLNGKAKQDMTEKLADIVTELYQRKPHATEQKVLVVLWHLLGNMTNSGSLPGAGGNIRTATAKLSKALFAQMGQNLLNQAASQPPHIKKSLEELLDMTILNEL

SEQ ID NO: 5137 - protein, 447 aa, Homo Sapiens
MSRRPCSCALRPPRCSCSASPSAVTAAGRPRPSDSCKEESSTLSVKMKCDFNCNHVHSGLKLVKPDDIGRLVSYTPAYLEGSCKDCIKDYERLSCIGSPIVSPRIVQLETESKRLHNKENQHVQQTLNSTNEIEALETSRLYEDSGYSSFSLQSGLSEHEEGSLLEENFGDSLQSCLLQIQSPDQYPNKNLLPVLHFEKVVCSTLKKNAKRNPKVDREMLKEIIARGNFRLQNIIGRKMGLECVDILSELFRRGLRHVLATILAQLSDMDLINVSKVSTTWKKILEDDKGAFQLYSKAIQRVTENNNKFSPHASTREYVMFRTPLASVQKSAAQTSLKKDAQTKLSNQGDQKGSTYSRHNEFSEVAKTLKKNESLKACIRCNSPAKYDCYLQRATCKREGCGFDYCTKCLCNYHTTKDCSDGKLLKASCKIGPLPGTKKSKKNLRRL

SEQ ID NO: 5138 - protein, 9 aa, Homo Sapiens
MRGRELPLV

SEQ ID NO: 5139 - protein, 117 aa, Homo Sapiens
MRASSFLIVVVFLIAGTLVLEAAVTGVPVKGQDTVKGRVPFNGQDPVKGQVSVKGQDKVKAQEPVKGPVSTKPGSCPIILIRCAMLNPPNRCLKDTDCPGIKKCCEGSCGMACFVPQ

SEQ ID NO: 5140 - protein, 865 aa, Homo Sapiens
MALVLGSLLLLGLCGNSFSGGQPSSTDAPKAWNYELPATNYETQDSHKAGPIGILFELVHIFLYVVQPRDFPEDTLRKFLQKAYESKIDYDKPETVILGLKIVYYEAGIILCCVLGLLFIILMPLVGYFFCMCRCCNKCGGEMHQRQKENGPFLRKCFAISLLVICIIISIGIFYGFVANHQVRTRIKRSRKLADSNFKDLRTLLNETPEQIKYILAQYNTTKDKAFTDLNSINSVLGGGILDRLRPNIIPVLDEIKSMATAIKETKEALENMNSTLKSLHQQSTQLSSSLTSVKTSLRSSLNDPLCLVHPSSETCNSIRLSLSQLNSNPELRQLPPVDAELDNVNNVLRTDLDGLVQQGYQSLNDIPDRVQRQTTTVVAGIKRVLNSIGSDIDNVTQRLPIQDILSAFSVYVNNTESYIHRNLPTLEEYDSYWWLGGLVICSLLTLIVIFYYLGLLCGVCGYDRHATPTTRGCVSNTGGVFLMVGVGLSFLFCWILMIIVVLTFVFGANVEKLICEPYTSKELFRVLDTPYLLNEDWEYYLSGKLFNKSKMKLTFEQVYSDCKKNRGTYGTLHLQNSFNISEHLNINEHTGSISSELESLKVNLNIFLLGAAGRKNLQDFAACGIDRMNYDSYLAQTGKSPAGVNLLSFAYDLEAKANSLPPGNLRNSLKRDAQTIKTIHQQRVLPIEQSLSTLYQSVKILQRTGNGLLERVTRILASLDFAQNFITNNTSSVIIEETKKYGRTIIGYFEHYLQWIEFSISEKVASCKPVATALDTAVDVFLCSYIIDPLNLFWFGIGKATVFLLPALIFAVKLAKYYRRMDSEDVYDDVETIPMKNMENGNNGYHKDHVYGIHNPVMTSPSQH

SEQ ID NO: 5141 - protein, 1404 aa, Homo Sapiens
YWTFFVTCTMTGAEIESGAQVKPEKKPGEEVVGGAEIENDVPLVVRPKVRTQAQIMPGARPKNKSKVMPGASTKVETSAVGGARPKSKAKAIPVSRFKEEAQMWAQPRFGAERLSKTERNSQTNIIASPLVSTDSVLVAKTKYLSEDRELVNTDTESFPRRKAHYQAGFQPSFRSKEETNMGSWCCPRPTSKQEASPNSDFKWVDKSVSSLFWSGDEVTAKFHPGNRVKDSNRSMHMANQEANTMSRSQTNQELYIASSSGSEDESVKTPWFWARDKTNTWSGPREDPNSRSRFRSKKEVYVESSSGSEHEDHLESWFGAGKEGKFRSKMRAGKEANNRARHRAKREACIDFMPGSIDVIKKESCFWPEENANTFSRPMIKKEARARAMTKEEAKTKARARAKQEARSEEEALIGTWFWATDESSMADEASIESSLQVEDESIIGSWFWTEEEASMGTGASSKSRPRTDGERIGDSLFGAREKTSMKTGAEATSESILAADDEQVIIGSWFWAGEEVNQEAEEETIFGSWFWVIDAASVESGVGVSCESRTRSEEEEVIGPWFWSGEQVDIEAGIGEEARPGAEEETIFGSWFWAENQTYMDCRAETSCDTMQGAEEEEPIIGSWFWTRVEACVEGDVNSKSSLEDKEEAMIPCFGAKEEVSMKHGTGVRCRFMAGAEETNNKSCFWAEKEPCMYPAGGGSWKSRPEEEEDIVNSWFWSRKYTKPEAIIGSWLWATEESNIDGTGEKAKLLTEEETIINSWFWKEDEAISEATDREESRPEAEEGDIVGSWFWAGEEDRLEPAAETREEDRLAAEKEGIVGSWFGAREETIRREAGSCSKSSPKAEEEEVIIGSWFWEEEASPEAVAGVGFESKPGTEEEEITVGSWFWPEEEASIQAGSQAVEEMESETEEETIFGSWFWDGKEVSEEAGPCCVSKPEDDEEMIVESWFWSRDKAIKETGTVATCESKPENEEGAIVGSWFEAEDEVDNRTDNGSNCGSRTLADEDEAIVGSWFWAGDEAHFESNPSPVFRAICRSTCSVEQEPDPSRRPQSWEEVTVQFKPGPWGRVGFPSISPFRFPKEAASLFCEMFGGKPRNMVLSPEGEDQESLLQPDQPSPEFPFQYDPSYRSVQEIREHLRAKESTEPESSSCNCIQCELKIGSEEFEELLLLMEKIRDPFIHEISKIAMGMRSASQFTRDFIRDSGVVSLIETLLNYPSSRVRTSFLENMIRMAPPYPNLNIIQTYICKVCEETLAYSVDSPEQLSGIRMIRHLTTTTDYHTLVANYMSGFLSLLATGNAKTRFHVLKMLLNLSENLFMTKELLSAEAVSEFIGLFNREETNDNIQIVLAIFENIGNNIKKETVFSDDDFNIEPLISAFHKVEKFAKELQGKTDNQNDPEGDQEN

SEQ ID NO: 5142 - protein, 1143 aa, Homo Sapiens
MYLWLKLLAFGFAFLDTEVFVTGQSPTPSPTDAYLNASETTTLSPSGSAVISTTTIATTPSKPTCDEKYANITVDYLYNKETKLFTAKLNVNENVECGNNTCTNNEVHNLTECKNASVSISHNSCTAPDKTLILDVPPGVEKFQLHDCTQVEKADTTICLKWKNIETFTCDTQNITYRFQCGNMIFDNKEIKLENLEPEHEYKCDSEILYNNHKFTNASKIIKTDFGSPGEPQIIFCRSEAAHQGVITWNPPQRSFHNFTLCYIKETEKDCLNLDKNLIKYDLQNLKPYTKYVLSLHAYIIAKVQRNGSAAMCHFTTKSAPPSQVWNMTVSMTSDNSMHVKCRPPRDRNGPHERYHLEVEAGNTLVRNESHKNCDFRVKDLQYSTDYTFKAYFHNGDYPGEPFILHHSTSYNSKALIAFLAFLIIVTSIALLVVLYKIYDLHKKRSCNLDEQQELVERDDEKQLMNVEPIHADILLETYKRKIADEGRLFLAEFQSIPRVFSKFPIKEARKPFNQNKNRYVDILPYDYNRVELSEINGDAGSNYINASYIDGFKEPRKYIAAQGPRDETVDDFWRMIWEQKATVIVMVTRCEEGNRNKCAEYWPSMEEGTRAFGDVVVKINQHKRCPDYIIQKLNIVNKKEKATGREVTHIQFTSWPDHGVPEDPHLLLKLRRRVNAFSNFFSGPIVVHCSAGVGRTGTYIGIDAMLEGLEAENKVDVYGYVVKLRRQRCLMVQVEAQYILIHQALVEYNQFGETEVNLSELHPYLHNMKKRDPPSEPSPLEAEFQRLPSYRSWRTQHIGNQEENKSKNRNSNVIPYDYNRVPLKHELEMSKESEHDSDESSDDDSDSEEPSKYINASFIMSYWKPEVMIAAQGPLKETIGDFWQMIFQRKVKVIVMLTELKHGDQEICAQYWGEGKQTYGDIEVDLKDTDKSSTYTLRVFELRHSKRKDSRTVYQYQYTNWSVEQLPAEPKELISMIQVVKQKLPQKNSSEGNKHHKSTPLLIHCRDGSQQTGIFCALLNLLESAETEEVVDIFQVVKALRKARPGMVSTFEQYQFLYDVIASTYPAQNGQVKKNNHQEDKIEFDNEVDKVKQDANCVNPLGAPEKLPEAKEQAEGSEPTSGTEGPEHSVNGPASPALNQGS

SEQ ID NO: 5143 - protein, 1097 aa, Homo Sapiens
MAAAAAEQQQFYLLLGNLLSPDNVVRKQAEETYENIPGQSKITFLLQAIRNTTAAEEARQMAAVLLRRLLSSAFDEVYPALPSDVQTAIKSELLMIIQMETQSSMRKKVCDIAAELARNLIDEDGNNQWPEGLKFLFDSVSSQNVGLREAALHIFWNFPGIFGNQQQHYLDVIKRMLVQCMQDQEHPSIRTLSARATAAFILANEHNVALFKHFADLLPGFLQAVNDSCYQNDDSVLKSLVEIADTVPKYLRPHLEATLQLSLKLCGDTSLNNMQRQLALEVIVTLSETAAAMLRKHTNIVAQTIPQMLAMMVDLEEDEDWANADELEDDDFDSNAVAGESALDRMACGLGGKLVLPMIKEHIMQMLQNPDWKYRHAGLMALSAIGEGCHQQMEGILNEIVNFVLLFLQDPHPRVRYAACNAVGQMATDFAPGFQKKFHEKVIAALLQTMEDQGNQRVQAHAAAALINFTEDCPKSLLIPYLDNLVKHLHSIMVLKLQELIQKGTKLVLEQVVTSIASVADTAEEKFVPYYDLFMPSLKHIVENAVQKELRLLRGKTIECISLIGLAVGKEKFMQDASDVMQLLLKTQTDFNDMEDDDPQISYMISAWARMCKILGKEFQQYLPVVMGPLMKTASIKPEVALLDTQDMENMSDDDGWEFVNLGDQQSFGIKTAGLEEKSTACQMLVCYAKELKEGFVEYTEQVVKLMVPLLKFYFHDGVRVAAAESMPLLLECARVRGPEYLTQMWHFMCDALIKAIGTEPDSDVLSEIMHSFAKCIEVMGDGCLNNEHFEELGGILKAKLEEHFKNQELRQVKRQDEDYDEQVEESLQDEDDNDVYILTKVSDILHSIFSSYKEKVLPWFEQLLPLIVNLICPHRPWPDRQWGLCIFDDVIEHCSPASFKYAEYFLRPMLQYVCDNSPEVRQAAAYGLGVMAQYGGDNYRPFCTEALPLLVRVIQSADSKTKENVNATENCISAVGKIMKFKPDCVNVEEVLPHWLSWLPLHEDKEEAVQTFNYLCDLIESNHPIVLGPNNTNLPKIFSIIAEGEMHEAIKHEDPCAKRLANVVRQVQTSGGLWTECIAQLSPEQQAAIQELLNSA

SEQ ID NO: 5144 - protein, 529 aa, Homo Sapiens
MDLPVGPGAAGPSNVPAFLTKLWTLVSDPDTDALICWSPSGNSFHVFDQGQFAKEVLPKYFKHNNMASFVRQLNMYGFRKVVHIEQGGLVKPERDDTEFQHPCFLRGQEQLLENIKRKVTSVSTLKSEDIKIRQDSVTKLLTDVQLMKGKQECMDSKLLAMKHENEALWREVASLRQKHAQQQKVVNKLIQFLISLVQSNRILGVKRKIPLMLNDSGSAHSMPKYSRQFSLEHVHGSGPYSAPSPAYSSSSLYAPDAVASSGPIISDITELAPASPMASPGGSIDERPLSSSPLVRVKEEPPSPPQSPRVEEASPGRPSSVDTLLSPTALIDSILRESEPAPASVTALTDARGHTDTEGRPPSPPPTSTPEKCLSVACLDKNELSDHLDAMDSNLDNLQTMLSSHGFSVDTSALLDLFSPSVTVPDMSLPDLDSSLASIQELLSPQEPPRPPEAENSSPDSGKQLVHYTAQPLFLLDPGSVDTGSNDLPVLFELGEGSYFSEGDGFAEDPTISLLTGSEPPKAKDPTVS

SEQ ID NO: 5145 - protein, 415 aa, Homo Sapiens
KASELERLALWPGLAASPSTVHSKPVSDVARPAWLGPKAWHECEMLELLPPFVGLCASLAGHSSAWQAYLSLSSTVLGPAPGPGPEPLSLLQKLILWRVLRPECLAGALADFTTSLLGRPLDENTYAPTMPFKHSQATQPMLILLPPPGHPSATLHPLTVIQKLAAKYQQGQKQLQVIALGSEAWDPVSVVVSTLSQAMYEGHWLVLDNCHLMPHWPKELLQLLLELLGRAKVVADLESEQLLDQPESRNVSTVHRDFRLWLIVPAESSASLPAVLTQHSMPVFWNQSLELGHVLIDSVELAQQVLYMQPPTQALPLLLLHGLLLHRQLYGTRLQAHRGRWSQVTLTQVLQTQDQLWASLSNPRAAMQELAGETLPLPLGVISPQESLEEGGGGIQFTALVLAVVETEGTGTERL

SEQ ID NO: 5146 - protein, 523 aa, Homo Sapiens
MTQNKLKLCSKANVYTEVPDGGWGWAVAVSFFFVEVFTYGIIKTFGVFFNDLMDSFNESNSRISWIISICVFVLTFSAPLATVLSNRFGHRLVVMLGGLLVSTGMVAASFSQEVSHMYVAIGIISGLGYCFSFLPTVTILSQYFGKRRSIVTAVASTGECFAVFAFAPAIMALKERIGWRYSLLFVGLLQLNIVIFGALLRPIIIRGPASPKIVIQENRKEAQYMLENEKTRTSIDSIDSGVELTTSPKNVPTHTNLELEPKADMQQVLVKTSPRPSEKKAPLLDFSILKEKSFICYALFGLFATLGFFAPSLYIIPLGISLGIDQDRAAFLLSTMAIAEVFGRIGAGFVLNREPIRKIYIELICVILLTVSLFAFTFATEFWGLMSCSIFFGFMVGTIGGLTFHCLLKMMSWALQKMSSAAGVYIFIQSIAGLAGPPLAGLLVDQSKIYSRAFYSCAAGMALAAVCLALVRPCKMGLCQRHHSGETKVVSHRGKTLQDIPEDFLEMDLAKNEHRVHVQMEPV

SEQ ID NO: 5147 - protein, 169 aa, Homo Sapiens
MTAGRRMEMLCAGRVPALLLCLGFHLLQAVLSTTVIPSCIPGESSDNCTALVQTEDNPRVAQVSITKCSSDMNGYCLHGQCIYLVDMSQNYCRCEVGYTGVRCEHFFLTVHQPLSKEYVALTVILIILFLITVVGSTYYFCRWYRNRKSKEPKKEYERVTSGDPELPQV

SEQ ID NO: 5148 - protein, 829 aa, Homo Sapiens
MVPAWLWLLCVSVPQALPKAQPAELSVEVPENYGGNFPLYLTKLPLPREGAEGQIVLSGDSGKATEGPFAMDPDSGFLLVTRALDREEQAEYQLQVTLEMQDGHVLWGPQPVLVHVKDENDQVPHFSQAIYRARLSRGTRPGIPFLFLEASDRDEPGTANSDLRFHILSQAPAQPSPDMFQLEPRLGALALSPKGSTSLDHALERTYQLLVQVKDMGDQASGHQATATVEVSIIESTWVSLEPIHLAENLKVLYPHHMAQVHWSGGDVHYHLESHPPGPFEVNAEGNLYVTRELDREAQAEYLLQVRAQNSHGEDYAAPLELHVLVMDENDNVPICPPRDPTVSIPELSPPGTEVTRLSAEDADAPGSPNSHVVYQLLSPEPEDGVEGRAFQVDPTSGSVTLGVLPLRAGQNILLLVLAMDLAGAEGGFSSTCEVEVAVTDINDHAPEFITSQIGPISLPEDVEPGTLVAMLTAIDADLEPAFRLMDFAIERGDTEGTFGLDWEPDSGHVRLRLCKNLSYEAAPSHEVVVVVQSVAKLVGPGPGPGATATVTVLVERVMPPPKLDQESYEASVPISAPAGSFLLTIQPSDPISRTLRFSLVNDSEGWLCIEKFSGEVHTAQSLQGAQPGDTYTVLVEAQDTDEPRLSASAPLVIHFLKAPPAPALTLAPVPSQYLCTPRQDHGLIVSGPSKDPDLASGHGPYSFTLGPNPTVQRDWRLQTLNGSHAYLTLALHWVEPREHIIPVVVSHNAQMWQLLVRVIVCRCNVEGQCMRKVGRMKGMPTKLSAVGILVGTLVAIGIFLILIFTHWTMSRKKDPDQPADSVPLKATV

SEQ ID NO: 5149 - protein, 1167 aa, Homo Sapiens
SEQASAPLAKDKQIEELRQECHLLQARVASGPCSDLHTGRGGPCTQWLNVRDLDRLQRESQREVLRLQRQLMLQQGNGGAWPEAGGQSATCEEVRRQMLALERELDQRRRECQELGAQAAPARRRGEEAETQLQAALLKNAWLAEENGRLQAKTDWVRKVEAENSEVRGHLGRACQERDASGLIAEQLLQQAARGQDRQQQLQRDPQKALCDLHPSWKEIQALQCRPGHPPEQPWETSQMPESQVKGSRRPKFHARPEDYAVSQPNRDIQEKREASLEESPVALGESASVPQVSETVPASQPLSKKTSSQSNSSSEGSMWATVPSSPTLDRDTASEVDDLEPDSVSLALEMGGSAAPAAPKLKIFMAQYNYNPFEGPNDHPEGELPLTAGDYIYIFGDMDEDGFYEGELEDGRRGLVPSNFVEQIPDSYIPGCLPAKSPDLGPSQLPAGQDEALEEDSLLSGKAQGVVDRGLCQMVRVGSKTEVATEILDTKTEACQLGLLQSMGKQGLSRPLLGTKGVLRMAPMQLHLQNVTATSANITWVYSSHRHPHVVYLDDREHALTPAGVSCYTFQGLCPGTHYRARVEVRLPRDLLQVYWGTMSSTVTFDTLLAGPPYPPLDVLVERHASPGVLVVSWLPVTIDSAGSSNGVQVTGYAVYADGLKVCEVADATAGSTLLEFSQLQVPLTWQKVSVRTMSLCGESLDSVPAQIPEDFFMCHRWPETPPFSYTCGDPSTYRVTFPVCPQKLSLAPPSAKASPHNPGSCGEPQAKFLEAFFEEPPRRQSPVSNLGSEGECPSSGAGSQAQELAEAWEGCRKDLLFQKSPQNHRPPSVSDQPGEKENCYQHMGTSKSPAPGFIHLRTECGPRKEPCQEKAALERVLRQKQDAQGFTPPQLGASQQYASDFHNVLKEEQEALCLDLWGTERREERREPEPHSRQGQALGVKRGCQLHEPSSALCPAPSAKVIKMPRGGPQQLGTGANTPARVFVALSDYNPLVMSANLKAAEEELVFQKRQLLRVWGSQDTHDFYLSECNRQVGNIPGRLVAEMEVGTEQTDRRWRSPAQGHLPSVAHLEDFQGLTIPQGSSLVLQGNSKRLPLWTPKIMIAALDYDPGDGQMGGQGKGRLALRAGDVVMVYGPMDDQGFYYGELGGHRGLVPAHLLDHMSLHGH

SEQ ID NO: 5150 - protein, 254 aa, Homo Sapiens
MEYASDASLDPEAPWPPAPRARACRVLPWALVAGLLLLLLLAAACAVFLACPWAVSGARASPGSAASPRLREGPELSPDDPAGLLDLRQGMFAQLVAQNVLLIDGPLSWYSDPGLAGVSLTGGLSYKEDTKELVVAKAGVYYVFFQLELRRVVAGEGSGSVSLALHLQPLRSAAGAAALALTVDLPPASSEARNSAFGFQGRLLHLSAGQRLGVHLHTEARARHAWQLTQGATVLGLFRVTPEIPAGLPSPRSE

SEQ ID NO: 5151 - protein, 316 aa, Homo Sapiens
MATFVELSTKAKMPIVGLGTWKSPLGKVKEAVKVAIDAGYRHIDCAYVYQNEHEVGEAIQEKIQEKAVKREDLFIVSKLWPTFFERPLVRKAFEKTLKDLKLSYLDVYLIHWPQGFKSGDDLFPKDDKGNAIGGKATFLDAWEAMEELVDEGLVKALGVSNFSHFQIEKLLNKPGLKYKPVTNQVECHPYLTQEKLIQYCHSKGITVTAYSPLGSPDRPWAKPEDPSLLEDPKIKEIAAKHKKTAAQVLIRFHIQRNVIVIPKSVTPARIVENIQVFDFKLSDEEMATILSFNRNWRACNVLQSSHLEDYPFDAEY

SEQ ID NO: 5152 - protein, 1156 aa, Homo Sapiens
PLKMETSGMTTPSLKTDGGRRTATSPPPTTSQTIISTIPSTAMHTRSTAAPIPILPERGVSLFPYGADAGDLEFVRRTVDFTSPLFKPATGFPLGSSLRDSLYFTDNGQIIFPESDYQIFSYPNPLPTGFTGRDPVALVAPFWDDADFSTGRGTTFYQEYETFYGEHSLLVQQAESWIRKITNNGGYKARWALKVTWVNAHAYPAQWTLGSNTYQAILSTDGSRSYALFLYQSGGMQWDVAQRSGNPVLMGFSSGDGYFENSPLMSQPVWERYRPDRFLNSNSGLQGLQFYRLHREERPNYRLECLQWLKSQPRWPSWGWNQVSCPCSWQQGRRDLRFQPVSIGRWGLGSRQLCSFTSWRGGVCCSYGPWGEFREGWHVQRPWQLAQELEPQSWCCRWNDKPYLCALYQQRRPHVGCATYRPPQPAWMFGDPHITTLDGVSYTFNGLGDFLLVGAQDGNSSFLLQGRTAQTGSAQATNFIAFAAQYRSSSLGPVTVQWLLEPHDAIRVLLDNQTVTFQPDHEDGGGQETFNATGVLLSRNGSEVSASFDGWATVSVIALSNILHASASLPPEYQNRTEGLLGVWNNNPEDDFRMPNGSTIPPGSPEEMLFHFGMTWQINGTGLLGKRNDQLPSNFTPVFYSQLQKNSSWAEHLISNCDGDSSCIYDTLALRNASIGLHTREVSKNYEQANATLNQYPPSINGGRVIEAYKGQTTLIQYTSNAEDANFTLRDSCTDLELFENGTLLWTPKSLEPFTLEILARSAKIGLASALQPRTVVCHCNAESQCLYNQTSRVGNSSLEVAGCKCDGGTFGRYCEGSEDACEEPCFPSVHCVPGKGCEACPPNLTGDGRHCAALGSSFLCQNQSCPVNYCYNQGHCYISQTLGCQPMCTCPPAFTDSRCFLAGNNFSPTVNLELPLRVIQLLLSEEENASMAEVNASVAYRLGTLDMRAFLRNSQVERIDSAAPASGSPIQHWMVISEFQYRPRGPVIDFLNNQLLAAVVEAFLYHVPRRSEEPRNDVVFQPISEEDVRDVTALNVSTLKAYFRCDGYKGYDLVYSPQSGFTCVSPCSRGYCDHGGQCQHLPSGPRCSCVSFSIYTAWGEHCEHLSMKLDAFFGIFFGALGGLLLLGVGTFVVLRFWGCSGARFSYFLNSAEALP

SEQ ID NO: 5153 - protein, 372 aa, Homo Sapiens
MHRGTQEGAMASRLLHRLRHALAGDGPGEAAASPEAEQFPESSELEDDDAEGLSSRLSGTLSFTSAEDDEDDEDEDDEEAGPDQLPLGDGTSGEDAGDPPPDGQWGSQLLARQLQDFWKKSRNTLAPQRLLFEVTSANVVKDPPSKYVLYTLAVIGPGPPDCQPAQISRRYSDFERLHRNLQRQFRGPMAAISFPRKRLRRNFTAETIARRSRAFEQFLGHLQAVPELRHAPDLQDFFVLPELRRAQSLTCTGLYREALALWANAWQLQAQLGTPSGPDRPLLTLAGLAVCHQELEDPGEARACCEKALQLLGDKSLHPLLAPFLEAHVRLSWRLGLDKRQSEARLQALQEAGLTPTPPPSLKELLIKEVLD

SEQ ID NO: 5154 - protein, 555 aa, Homo Sapiens
MPSWIGAVILPLLGLLLSLPAGADVKARSCGEVRQAYGAKGFSLADIPYQEIAGEHLRICPQEYTCCTTEMEDKLSQQSKLEFENLVEETSHFVRTTFVSRHKKFDEFFRELLENAEKSLNDMFVRTYGMLYMQNSEVFQDLFTELKRYYTGGNVNLEEMLNDFWARLLERMFQLINPQYHFSEDYLECVSKYTDQLKPFGDVPRKLKIQVTRAFIAARTFVQGLTVGREVANRVSKVSPTPGCIRALMKMLYCPYCRGLPTVRPCNNYCLNVMKGCLANQADLDTEWNLFIDAMLLVAERLEGPFNIESVMDPIDVKISEAIMNMQENSMQVSAKVFQGCGQPKPAPALRSARSAPENFNTRFRPYNPEERPTTAAGTSLDRLVTDIKEKLKLSKKVWSALPYTICKDESVTAGTSNEEECWNGHSKARYLPEIMNDGLTNQINNPEVDVDITRPDTFIRQQIMALRVMTNKLKNAYNGNDVNFQDTSDESSGSGSGSGCMDDVCPTEFEFVTTEAPAVDPDRREVDSSAAQRGHSLLSWSLTCIVLALQRLCR

SEQ ID NO: 5155 - protein, 161 aa, Homo Sapiens
MDDIYKAAVEQLTEEQKNEFKAAFDIFVLGAEDGCISTKELGKVMRMLGQNPTPEELQEMIDEVDEDGSGTVDFDEFLVMMVRCMKDDSKGKSEEELSDLFRMFDKNADGYIDLDELKIMLQATGETITEDDIEELMKDGDKNNDGRIDYDEFLEFMKGVE

SEQ ID NO: 5156 - protein, 756 aa, Homo Sapiens
MASAPPASPPGSEPPGPDPEPGGPDGPGAAQLAPGPAELRLGAPVGGPDPQSPGLDEPAPGAAADGGARWSAGPAPGLEGGPRDPGPSAPPPRSGPRGQLASPDAPGPGPRSEAPLPELDPLFSWTEEPEECGPASCPESAPFRLQGSSSSHRARGEVDVFSPFPAPTAGELALEQGPGSPPQPSDLSQTHPLPSEPVGSQEDGPRLRAVFDALDGDGDGFVRIEDFIQFATVYGAEQVKDLTKYLDPSGLGVISFEDFYQGITAIRNGDPDGQCYGGVASAQDEEPLACPDEFDDFVTYEANEVTDSAYMGSESTYSECETFTDEDTSTLVHPELQPEGDADSAGGSAVPSECLDAMEEPDHGALLLLPGRPHPHGQSVITVIGGEEHFEDYGEGSEAELSPETLCNGQLGCSDPAFLTPSPTKRLSSKKVARYLHQSGALTMEALEDPSPELMEGPEEDIADKVVFLERRVLELEKDTAATGEQHSRLRQENLQLVHRANALEEQLKEQELRACEMVLEETRRQKELLCKMEREKSIEIENLQTRLQQLDEENSELRSCTPCLKANIERLEEEKQKLLDEIESLTLRLSEEQENKRRMGDRLSHERHQFQRDKEATQELIEDLRKQLEHLQLLKLEAEQRRGRSSSMGLQEYHSRARESELEQEVRRLKQDNRNLKEQNEELNGQIITLSIQGAKSLFSTAFSESLAAEISSVSRDELMEAIQKQEEINFRLQDYIDRIIVAIMETNPSILEVK

SEQ ID NO: 5157 - protein, 961 aa, Homo Sapiens
MHGHRAPGGRRAFGARTPGHEPAGAAPPACADSDPGASEPGLLARRGSGSALGGPLDPQFVGPSDTSLGAAPGHRVLPCGPSPQHHRALRFSYHLEGSQPRPGLHQGNRILVKSLSLDPGQSLEPHPEGPQRLRSDPGPPTETPSQRPSPLKRAPGPKPQVPPKPSYLQMPRMPPPLEPIPPPPSRPLPADPRVGKGLAPRAEASPSSAAVSSLIEKFEREPVIVASDRPVPGPSPGPPEPVMLPQPTSQPPVPQLPEGEASRCLFLLAPGPRDGEKVPNRDSGIDSISSPSNSEETCFVSDDGPPSHSLCPGPPALASVPVALADPHRPGSQEVDSDLEEEDDEEEEEEKDREIPVPLMERQESVELTVQQKVFHIANELLQTEKAYVSRLHLLDQVFCARLLEEARNRSSFPADVVHGIFSNICSIYCFHQQFLLPELEKRMEEWDRYPRIGDILQKLAPFLKMYGEYVKNFDRAVELVNTWTERSTQFKVIIHEVQKEEACGNLTLQHHMLEPVQRIPRYELLLKDYLLKLPHGSPDSKDAQKSLELIATAAEHSNAAIRKMERMHKLLKVYELLGGEEDIVSPTKELIKEGHILKLSAKNGTTQDRYLILFNDRLLYCVPRLRLLGQKFSVRARIDVDGMELKESSNLNLPRTFLVSGKQRSLELQARTEEEKKDWVQAINSTLLKHEQTLETFKLLNSTNREDEDTPPNSPNVDLGKRAPTPIREKEVTMCMRCQEPFNSITKRRHHCKACGHVVCGKCSEFRARLVYDNNRSNRVCTDCYVALHGVPGSSPACSQHTPQRRRSILEKQASVAAENSVICSFLHYMEKGGKGWHKAWFVVPENEPLVLYIYGAPQDVKAQRSLPLIGFEVGPPEAGERPDRRHVFKITQSHLSWYFSPETEELQRRWMAVLGRAGRGDTFCPGPTLSEDREMEEAPVAALGATAEPPESPQTRDKT

SEQ ID NO: 5158 - protein, 739 aa, Homo Sapiens
MASILLRSCRGRAPARLPPPPRYTVPRGSPGDPAHLSCASTLGLRNCLNVPFGCCTPIHPVYTSSRGDHLGCWALRPECLRIVSRAPWTSTSVGFVAVGPQCLPVRGWHSSRPVRDDSVVEKSLKSLKDKNKKLEEGGPVYSPPAEVVVKKSLGQRVLDELKHYYHGFRLLWIDTKIAARMLWRILNGHSLTRRERRQFLRICADLFRLVPFLVFVVVPFMEFLLPVAVKLFPNMLPSTFETQSLKEERLKKELRVKLELAKFLQDTIEEMALKNKAAKGSATKDFSVFFQKIRETGERPSNEEIMRFSKLFEDELTLDNLTRPQLVALCKLLELQSIGTNNFLRFQLTMRLRSIKADDKLIAEEGVDSLNVKELQAACRARGMRALGVTEDRLRGQLKQWLDLHLHQEIPTSLLILSRAMYLPDTLSPADQLKSTLQTLPEIVAKEAQVKVAEVEGEQVDNKAKLEATLQEEAAIQQEHREKELQKRSEVAKDFEPERVVAAPQRPGTEPQPEMPDTVLQSETLKDTAPVLEGLKEEEITKEEIDILSDACSKLQEQKKSLTKEKEELELLKEDVQDYSEDLQEIKKELSKTGEEKYVEESKASKRLTKRVQQMIGQIDGLISQLEMDQQAGKLAPANGMPTGENVISVAELINAMKQVKHIPESKLTSLAAALDENKDGKVNIDDLVKVIELVDKEDVHISTSQVAEIVATLEKEEKVEEKEKAKEKAEKEVAEVKS

SEQ ID NO: 5159 - protein, 810 aa, Homo Sapiens
DPPRMSASPDDLSTGGRLQNMTVDECFQSRNTVLQGQPFGGVPTVLCLNIALWVLVLVVYSFLRKAAWDYGRLALLIHNDSLTSLIYGEQSEKTSPSETSLEMERRDKGFCSWFFNSITMKDEDLINKCGDDARIYIVFQYHLIIFVLIICIPSLGIILPINYTGSVLDWSSHFARTTIVNVSTESKLLWLHSLLSFFYFITNFMFMAHHCLGFAPRNSQKVTRTLMITYVPKDIEDPELIIKHFHEAYPGSVVTRVHFCYDVRNLIDLDDQRRHAMRGRLFYTAKAKKTGKVMIRIHPCARLCFCKCWTCFKEVDAEQYYSELEEQLTDEFNAELNRVPLKRLDLIFVTFQDSRMAKRVRKDYKYVQCGVQPQQSSVTTIVKSYYWRVTMAPHPKDIIWKHLSVRRFFWWARFIAINTFLFFLFFFLTTPAIIMNTIDMYNVTRPIEKLQNPIVTQFFPSVMLWGFTVILPLIVYFSAFLEAHWTRSSQNLVMVHKCYIFLVFMVVILPSMGLTSLDVFLRWLFDIYYLEQASIRFQCVFLPDNGAFFVNYVITAALLGTGMELLRLGSLFCYSTRLFFSRSEPERVNIRKNQAIDFQFGREYAWMMNVFSVVMAYSITCPIIVPFGLLYLCMKHLTDRYNMYYSFAPTKLNEQIHMAAVSQAIFAPLLGLFWMLFFSILRLGSLHAITIFSLSTLLIAMVIAFVGIFLGKLRMVADYEPEEEEIQTVFDMEPSSTSSTPTSLLYVATVLQEPELNLTPASSPARHTYGTMNNQPEEGEEESGLRGFARELDSAQFQEGLELEGQNQYH

SEQ ID NO: 5160 - protein, 757 aa, Homo Sapiens
MVPDTACVLLLTLAALGASGQGQSPLGSDLGPQMLRELQETNAALQDVRDWLRQQVREITFLKNTVMECDACGMQQSVRTGLPSVRPLLHCAPGFCFPGVACIQTESGGRCGPCPAGFTGNGSHCTDVNECNAHPCFPRVRCINTSPGFRCEACPPGYSGPTHQGVGLAFAKANKQVCTDINECETGQHNCVPNSVCINTRGSFQCGPCQPGFVGDQASGCQRGAQRFCPDGSPSECHEHADCVLERDGSRSCVCRVGWAGNGILCGRDTDLDGFPDEKLRCPEPQCRKDNCVTVPNSGQEDVDRDGIGDACDPDADGDGVPNEKDNCPLVRNPDQRNTDEDKWGDACDNCRSQKNDDQKDTDQDGRGDACDDDIDGDRIRNQADNCPRVPNSDQKDSDGDGIGDACDNCPQKSNPDQADVDHDFVGDACDSDQDQDGDGHQDSRDNCPTVPNSAQEDSDHDGQGDACDDDDDNDGVPDSRDNCRLVPNPGQEDADRDGVGDVCQDDFDADKVVDKIDVCPENAEVTLTDFRAFQTVVLDPEGDAQIDPNWVVLNQGREIVQTMNSDPGLAVGYTAFNGVDFEGTFHVNTVTDDDYAGFIFGYQDSSSFYVVMWKQMEQTYWQANPFRAVAEPGIQLKAVKSSTGPGEQLRNALWHTGDTESQVRLLWKDPRNVGWKDKKSYRWFLQHRPQVGYIRVRFYEGPELVADSNVVLDTTMRGGRLGVFCFSQENIIWANLRYRCNDTIPEDYETHQLRQA

SEQ ID NO: 5161 - protein, 522 aa, Homo Sapiens
MALLPRALSAGAGPSWRRAARAFRGFLLLLPEPAALTRALSRAMACRQEPQPQGPPPAAGAVASYDYLVIGGGSGGLASARRAAELGARAAVVESHKLGGTCVNVGCVPKKVMWNTAVHSEFMHDHADYGFPSCEGKFNWRVIKEKRDAYVSRLNAIYQNNLTKSHIEIIRGHAAFTSDPKPTIEVSGKKYTAPHILIATGGMPSTPHESQIPGASLGITSDGFFQLEELPGRSVIVGAGYIAVEMAGILSALGSKTSLMIRHDKVLRSFDSMISTNCTEELENAGVEVLKFSQVKEVKKTLSGLEVSMVTAVPGRLPVMTMIPDVDCLLWAIGRVPNTKDLSLNKLGIQTDDKGHIIVDEFQNTNVKGIYAVGDVCGKALLTPVAIAAGRKLAHRLFEYKEDSKLDYNNIPTVVFSHPPIGTVGLTEDEAIHKYGIENVKTYSTSFTPMYHAVTKRKTKCVMKMVCANKEEKVVGIHMQGLGCDEMLQGFAVAVKMGATKADFDNTVAIHPTSSEELVTLR

SEQ ID NO: 5162 - protein, 140 aa, Homo Sapiens
MGPRRRSRKPEAPRRRSPSPTPTPGPSRRGPSLGASSHQHSRRRQGWLKEIRKLQKSTHLLIRKLPFSRLAREICVKFTRGVDFNWQAQALLALQEAAEAFLVHLFEDAYLLTLHAGRVTLFPKDVQLARRIRGLEEGLG

SEQ ID NO: 5163 - protein, 1394 aa, Homo Sapiens
MHSSNPKVRSSPSGNTQSSPKSKQEVMVRPPTVMSPSGNPQLDSKFSNQGKQGGSASQSQPSPCDSKSGGHTPKALPGPGGSMGLKNGAGNGAKGKGKRERSISADSFDQRDPGTPNDDSDIKECNSADHIKSQDSQHTPHSMTPSNATAPRSSTPSHGQTTATEPTPAQKTPAKVVYVFSTEMANKAAEAVLKGQVETIVSFHIQNISNNKTERSTAPLNTQISALRNDPKPLPQQPPVPANQDQNSSQNTRLQPTPPIPAPAPKPAAPPRPLDRESPGVENKLIPSVGSPASSTPLPPDGTGPNSTPNNRAVTPVSQGSNSSSADPKAPPPPPVSSGEPPTLGENPDGLSQEQLEHRERSLQTLRDIQRMLFPDEKEFTGAQSGGPQQNPGVLDGPQKKPEGPIQAMMAQSQSLGKGPGPRTDVGAPFGPQGHRDVPFSPDEMVPPSMNSQSGTIGPDHLDHMTPEQIAWLKLQQEFYEEKRRKPEQVVVQQCSLQDMMVHQHGPRGVVRGPPPPYQMTPSEGWAPGGTEPFSDGINMPHSLPPRGMAPHPNMPGSQMRLPGFAGMINSEMEGPNVPNPASRPGLSGVSWPDDVPKIPDGRNFPPGRGIFSGPGRGERFPNPQGLSEEMFQQQLAEKQLGLPPGMAMEGIRPSMEMNRMIPGSQRHMEPGNNPIFPRIPVEGPLSPSRGDFPKGIPPQMGPGRELEFGMVPSGMKGDVNLNVNMGSNSQMIPQKMREAGAGPEEMLKLRPGGSDMLPAQQKMVPLPFGEHPQQEYGMGPRPFLPMSQGPGSNSGLRNLREPIGPDQRTNSRLSHMPPLPLNPSSNPTSLNTAPPVQRGLGRKPLDISVAGSQVHSPGINPLKSPTMHQVQSPMLGSPSGNLKSPQTPSQLAGMLAGPAAAASIKSPPVLGSAAASPVHLKSPSLPAPSPGWTSSPKPPLQSPGIPPNHKAPLTMASPAMLGNVESGGPPPPTASQPASVNIPGSLPSSTPYTMPPEPTLSQNPLSIMMSRMSKFAMPSSTPLYHDAIKTVASSDDDSPPARSPNLPSMNNMPGMGINTQNPRISGPNPVVPMPTLSPMGMTQPLSHSNQMPSPNAVGPNIPPHGVPMGPGLMSHNPIMGHGSQEPPMVPQGRMGFPQGFPPVQSPPQQVPFPHNGPSGGQGSFPGGMGFPGEGPLGRPSNLPQSSADAALCKPGGPGGPDSFTVLGNSMPSVFTDPDLQEVIRPGATGIPEFDLSRIIPSEKPSQTLQYFPRGEVPGRKQPQGPGPGFSHMQGMMGEQAPRMGLALPGMGGPGPVGTPDIPLGTAPSMPGHNPMRPPAFLQQGMMGPHHRMMSPAQSTMPGQPTLMSNPAAAVGMIPGKDRGPAGLYTHPGPVGSPGMMMSMQGMMGPNRTS

SEQ ID NO: 5164 - protein, 854 aa, Homo Sapiens
EELIGQISDIRVQNLQVERENVQKRTFTRWINLHLEKCNPPLEVKDLFVDIQDGKILMALLEVLSGRNLLHEYKSSSHRIFRLNNIAKALKFLEDSNVKLVSIDAAEIADGNPSLVLGLIWNIILFFQIKELTGNLSRNSPSSSLSPGSGGTDSDSSFPPTPTAERSVAISVKDQRKAIKALLAWVQRKTRKYGVAVQDFAGSWRSGLAFLAVIKAIDPSLVDMKQALENSTRENLEKAFSIAQDALHIPRLLEPEDIMVDTPDEQSIMTYVAQFLERFPELEAEDIFDSDKEVPIESTFVRIKETPSEQESKVFVLTENGERTYTVNHETSHPPPSKVFVCDKPESMKEFRLDGVSSHALSDSSTEFMHQIIDQVLQGGPGKTSDISEPSPESSILSSRKENGRSNSLPIKKTVHFEADTYKDPFCSKNLSLCFEGSPRVAKESLRQDGHVLAVEVAEEKEQKQESSKIPESSSDKVAGDIFLVEGTNNNSQSSSCNGALESTARHDEESHSLSPPGENTVMADSFQIKVNLMTVEALEEGDYFEAIPLKASKFNSDLIDFASTSQAFNKVPSPHETKPDEDAEAFENHAEKLGKRSIKSAHKKKDSPEPQVKMDKHEPHQDSGEEAEGCPSAPEETPVDKKPEVHEKAKRKSTRPHYEEEGEDDDLQGVGEELSSSPPSSCVSLETLGSHSEEGLDFKPSPPLSKVSVIPHDLFYFPHYEVPLAAVLEAYVEDPEDLKNEEMDLEEPEGYMPDLDSREEEADGSQSSSSSSVPGESLPSASDQVLYLSRGGVGTTPASEPAPLAPHEDHQQRETKENDPMDSHQSQESPNLENIANPLEENVTKESISSKKK

SEQ ID NO: 5165 - protein, 1199 aa, Homo Sapiens
MPLTGVEPARMNRKKGDKGFESPRPYKLTHQVVCINNINFHRKSVVGFVELTIFPTVANLNRIKLNSKQCRIYRVRINDLEAAFIYNDPTLEVCHSESKQRNLNYFSNAYAAAVSAVDPDAGNGELCIKVPSELWKHVDELKVLKIHINFSLDQPKGGLHFVVPSVEGSMAERGAHVFSCGYQNSTRFWFPCVDSYSELCTWKLEFTVDAAMVAVSNGDLVETVYTHDMRKKTFHYMLTIPTAASNISLAIGPFEILVDPYMHEVTHFCLPQLLPLLKHTTSYLHEVFEFYEEILTCRYPYSCFKTVFIDEAYVEVAAYASMSIFSTNLLHSAMIIDETPLTRRCLAQSLAQQFFGCFISRMSWSDEWVLKGISGYIYGLWMKKTFGVNEYRHWIKEELDKIVAYELKTGGVLLHPIFGGGKEKDNPASHLHFSIKHPHTLSWEYYTMFQCKAHLVMRLIENRISMEFMLQVFNKLLSLASTASSQKFQSHMWSQMLVSTSGFLKSISNVSGKDIQPLIKQWVDQSGVVKFYGSFAFNRKRNVLELEIKQDYTSPGTQKYVGPLKVTVQELDGSFNHTLQIEENSLKHDIPCHSKSRRNKKKKIPLMNGEEVDMDLSAMDADSPLLWIRIDPDMSVLRKVEFEQADFMWQYQLRYERDVVAQQESILALEKFPTPASRLALTDILEQEQCFYRVRMSACFCLAKIANSMVSTWTGPPAMKSLFTRMFCCKSCPNIVKTNNFMSFQSYFLQKTMPVAMALLRDVHNLCPKEVLTFILDLIKYNDNRKNKFSDNYYRAEMIDALANSVTPAVSVNNEVRTLDNLNPDVRLILEEITRFLNMEKLLPSYRHTITVSCLRAIRVLQKNGHVPSDPALFKSYAEYGHFVDIRIAALEAVVDYTKVDRSYEELQWLLNMIQNDPVPYVRHKILNMLTKNPPFTKNMESPLCNEALVDQLWKLMNSGTSHDWRLRCGAVDLYFTLFGLSRPSCLPLPELGLVLNLKEKKAVLNPTIIPESVAGNQEAANNPSSHPQLVGFQNPFSSSQDEEEIDMDTVHDSQAFISHHLNMLERPSTPGLSKYRPASSRSALIPQHSAGCDSTPTTKPQWSLELARKGTGKEQAPLEMSMHPAASAPLSVFTKESTASKHSDHHHHHHHEHKKKKKKHKHKHKHKHKHDSKEKDKEPFTFSSPASGRSIRSPSLSD

SEQ ID NO: 5166 - protein, 461 aa, Homo Sapiens
MASPALAAALAVAAAAGPNASGAGERGSGGVANASGASWGPPRGQYSAGAVAGLAAVVGFLIVFTVVGNVLVVIAVLTSRALRAPQNLFLVSLASADILVATLVMPFSLANELMAYWYFGQVWCGVYLALDVLFCTSSIVHLCAISLDRYWSVTQAVEYNLKRTPRRVKATIVAVWLISAVISFPPLVSLYRQPDGAAYPQCGLNDETWYILSSCIGSFFAPCLIMGLVYARIYRVAKRRTRTLSEKRAPVGPDGASPTTENGLGAAAGEARTGTARPRPPTWSRTRAAQRPRGGAPGPLRRGGRRRAGAEGGAGGADGQGAGPGAAQSGALTASRSPGPGGRLSRASSRSVEFFLSRRRRARSSVCRRKVAQAREKRFTFVLAVVMGVFVLCWFPFFFIYSLYGICREACQVPGPLFKFFFWIGYCNSSLNPVIYTVFNQDFRPSFKHILFRRRRRGFRQ

SEQ ID NO: 5167 - protein, 437 aa, Homo Sapiens
MRRSSRPGSASSSRKHTPNFFSENSSMSITSEDSKGLRSAEPGPGEPEGRRARGPSCGEPALSAGVPGGTTWAGSSQQKPAPRSHNWQTACGAATVRGGASEPTGSPVVSEEPLDLLPTLDLRQEMPPPRVFKSFLSLLFQGLSVLLSLAGDVLVSMYREVCSIRFLFTAVSLLSLFLSAFWLGLLYLVSPLENEPKEMLTLSEYHERVRSQGQQLQQLQAELDKLHKEVSTVRAANSERVAKLVFQRLNEDFVRKPDYALSSVGASIDLQKTSHDYADRNTAYFWNRFSFWNYARPPTVILEPHVFPGNCWAFEGDQGQVVIQLPGRVQLSDITLQHPPPSVEHTGGANSAPRDFAVFGLQVYDETEVSLGKFTFDVEKSEIQTFHLQNDPPAAFPKVKIQILSNWGHPRFTCLYRVRAHGVRTSEGAEGSAQGPH

SEQ ID NO: 5168 - protein, 1997 aa, Homo Sapiens
MLSHGAGLALWITLSLLQTGLAEPERCNFTLAESKASSHSVSIQWRILGSPCNFSLIYSSDTLGAALCPTFRIDNTTYGCNLQDLQAGTIYNFKIISLDEERTVVLQTDPLPPARFGVSKEKTTSTGLHVWWTPSSGKVTSYEVQLFDENNQKIQGVQIQESTSWNEYTFFNLTAGSKYNIAITAVSGGKRSFSVYTNGSTVPSPVKDIGISTKANSLLISWSHGSGNVERYRLMLMDKGILVHGGVVDKHATSYAFHGLSPGYLYNLTVMTEAAGLQNYRWKLVRTAPMEVSNLKVTNDGSLTSLKVKWQRPPGNVDSYNITLSHKGTIKESRVLAPWITETHFKELVPGRLYQVTVSCVSGELSAQKMAVGRTFPDKVANLEANNNGRMRSLVVSWSPPAGDWEQYRILLFNDSVVLLNITVGKEETQYVMDDTGLVPGRQYEVEVIVESGNLKNSERCQGRTVPLAVLQLRVKHANETSLSIMWQTPVAEWEKYIISLADRDLLLIHKSLSKDAKEFTFTDLVPGRKYMATVTSISGDLKNSSSVKGRTVPAQVTDLHVANQGMTSSLFTNWTQAQGDVEFYQVLLIHENVVIKNESISSETSRYSFHSLKSGSLYSVVVTTVSGGISSRQVVVEGRTVPSSVSGVTVNNSGRNDYLSVSWLLAPGDVDNYEVTLSHDGKVVQSLVIAKSVRECSFSSLTPGRLYTVTITTRSGKYENHSFSQERTVPDKVQGVSVSNSARSDYLRVSWVHATGDFDHYEVTIKNKNNFIQTKSIPKSENECVFVQLVPGRLYSVTVTTKSGQYEANEQGNGRTIPEPVKDLTLRNRSTEDLHVTWSGANGDVDQYEIQLLFNDMKVFPPFHLVNTATEYRFTSLTPGRQYKILVLTISGDVQQSAFIEGFTVPSAVKNIHISPNGATDSLTVNWTPGGGDVDSYTVSAFRHSQKVDSQTIPKHVFEHTFHRLEAGEQYQIMIASVSGSLKNQINVVGRTVPASVQGVIADNAYSSYSLIVSWQKAAGVAERYDILLLTENGILLRNTSEPATTKQHKFEDLTPGKKYKIQILTVSGGLFSKEAQTEGRTVPAAVTDLRITENSTRHLSFRWTASEGELSWYNIFLYNPDGNLQERAQVDPLVQSFSFQNLLQGRMYKMVIVTHSGELSNESFIFGRTVPASVSHLRGSNRNTTDSLWFNWSPASGDFDFYELILYNPNGTKKENWKDKDLTEWRFQGLVPGRKYVLWVVTHSGDLSNKVTAESRTAPSPPSLMSFADIANTSLAITWKGPPDWTDYNDFELQWLPRDALTVFNPYNNRKSEGRIVYGLRPGRSYQFNVKTVSGDSWKTYSKPIFGSVRTKPDKIQNLHCRPQNSTAIACSWIPPDSDFDGYSIECRKMDTQEVEFSRKLEKEKSLLNIMMLVPHKRYLVSIKVQSAGMTSEVVEDSTITMIDRPPPPPPHIRVNEKDVLISKSSINFTVNCSWFSDTNGAVKYFTVVVREADGSDELKPEQQHPLPSYLEYRHNASIRVYQTNYFASKCAENPNSNSKSFNIKLGAEMESLGGKRDPTQQKFCDGPLKPHTAYRISIRAFTQLFDEDLKEFTKPLYSDTFFSLPITTESEPLFGAIEGVSAGLFLIGMLVAVVALLICRQKVSHGRERPSARLSIRRDRPLSVHLNLGQKGNRKTSCPIKINQFEGHFMKLQADSNYLLSKEYEELKDVGRNQSCDIALLPENRGKNRYNNILPYDATRVKLSNVDDDPCSDYINASYIPGNNFRREYIVTQGPLPGTKDDFWKMVWEQNVHNIVMVTQCVEKGRVKCDHYWPADQDSLYYGDLILQMLSESVLPEWTIREFKICGEEQLDAHRLIRHFHYTVWPDHGVPETTQSLIQFVRTVRDYINRSPGAGPTVVHCSAGVGRTGTFIALDRILQQLDSKDSVDIYGAVHDLRLHRVHMVQTECQYVYLHQCVRDVLRARKLRSEQENPLFPIYENVNPEYHRDPVYSRH

SEQ ID NO: 5169 - protein, 644 aa, Homo Sapiens
MARARGQAPGSGGRRRPRRGGAGTGPRGESAGLLLLLLQVLPPGATAGPGRRGTRGAGAGGGGVCWPGAAPAFPRDARLLLLLPPLPPLSPPPPSSAPAASASRMDALPRSGLNLKEEPLLPAGLGSVRSWMQGAGILDASTAAQSGVGLARAHFEKQPPSNLRKSNFFHFVLAMYDRQGQPVEVERTAFIDFVEKDREPGAEKTNNGIHYRLRLVYNNGLRTEQDLYVRLIDSMSKQAIIYEGQDKNPEMCRVLLTHEIMCSRCCDRKSCGNRNETPSDPVIIDRFFLKFFLKCNQNCLKNAGNPRDMRRFQVVVSTTVSVDGHVLAVSDNMFVHNNSKHGRRARRLDPSEAATPCIKAISPGEGWTTGGATVIVIGDNFFDGLQVVFGNVLVWSELITPHAIRVQTPPRHIPGVVEVTLSYKSKQFCKGCPGRFVYTALNEPTIDYGFQRLQKVIPRHPGDPERLPKEVLLKRAADLAEALYGVPGSNQELLLKRAADVAEALYSTPRAPGPLAPLAPSHPHPAVVGINAFSSPLAIAVGDATPGPEPGYARSCSSASPRGFAPSPGSQQSGYGGGLGAGLGGYGAPGVAGLGVPGSPSFLNGSTATSPFAKERLRPRAAPPKLPTPGLPQSPRRGASRPVF

SEQ ID NO: 5170 - protein, 889 aa, Homo Sapiens
MDARGGGGRPGESPGATPAPGPPPPPPPAPPQQQPPPPPPPAPPPGPGPAPPQHPPRAEALPPEAADEGGPRGRLRSRDSSCGRPGTPGAASTAKGSPNGECGRGEPQCSPAGPEGPARGPKVSFSCRGAASGPAPGPGPAEEAGSEEAGPAGEPRGSQASFMQRQFGALLQPGVNKFSLRMFGSQKAVEREQERVKSAGAWIIHPYSDFRFYWDFTMLLFMVGNLIIIPVGITFFKDETTAPWIVFNVVSDTFFLMDLVLNFRTGIVIEDNTEIILDPEKIKKKYLRTWFVVDFVSSIPVDYIFLIVEKGIDSEVYKTARALRIVRFTKILSLLRLLRLSRLIRYIHQWEEIFHMTYDLASAVMRICNLISMMLLLCHWDGCLQFLVPMLQDFPRNCWVSINGMVNHSWSELYSFALFKAMSHMLCIGYGRQAPESMTDIWLTMLSMIVGATCYAMFIGHATALIQSLDSSRRQYQEKYKQVEQYMSFHKLPADFRQKIHDYYEHRYQGKMFDEDSILGELNGPLREEIVNFNCRKLVASMPLFANADPNFVTAMLTKLKFEVFQPGDYIIREGTIGKKMYFIQHGVVSVLTKGNKEMKLSDGSYFGEICLLTRGRRTASVRADTYCRLYSLSVDNFNEVLEEYPMMRRAFETVAIDRLDRIGKKNSILLHKVQHDLNSGVFNNQENAIIQEIVKYDREMVQQAELGQRVGLFPPPPPPPQVTSAIATLQQAAAMSFCPQVARPLVGPLALGSPRLVRRPPPGPAPAAASPGPPPPASPPGAPASPRAPRTSPYGGLPAAPLAGPALPARRLSRASRPLSASQPSLPHGAPGPAASTRPASSSTPRLRPTPAARAAAPSPDRRDSASPGAAGGLDPQDSARSRLSSNL

SEQ ID NO: 5171 - protein, 336 aa, Homo Sapiens
MSQAVQTNGTQPLSKTWELSLYELQRTPQEAITDGLEIVVSPRSLHSELMCPICLDMLKNTMTTKECLHRFCADCIITALRSGNKECPTCRKKLVSKRSLRPDPNFDALISKIYPSRDEYEAHQERVLARINKHNNQQALSHSIEEGLKIQAMNRLQRGKKQQIENGSGAEDNGDSSHCSNASTHSNQEAGPSNKRTKTSDDSGLELDNNNAAMAIDPVMDGASEIELVFRPHPTLMEKDDSAQTRYIKTSGNATVDHLSKYLAVRLALEELRSKGESNQMNLDTASEKQYTIYIATASGQFTVLNGSFSLELVSEKYWKVNKPMELYYAPTKEHK

SEQ ID NO: 5172 - protein, 141 aa, Homo Sapiens
MEPRVTQRKRPLDGCMGKITGITSDILKYDHKCFKLSLPAKFPEVCGSDEVFPDPDLLHVLPVAGSLQQSIDQCCLQLESLCRPGLLCAHPTLLFKLHSSMKNRPFFSLIYTYVKKTQQVRKRDRKPRGQVAAGPNPTSVM

SEQ ID NO: 5173 - protein, 326 aa, Homo Sapiens
MTREGYQVSFLDNKSSGSSPEKELIPKPDTFHLTHDASLSKCLDVGDSSQIHPYQLPSDVGLENYDSCYSQTLSLHGSLGKRPQRSKNYQEYSIKPSNDIKTTASHSCGDLLTSLSNPDSSTGRLLKLSSDLYATTHFNSDPAVLVNVEQQLSTSLDDLTPAHGSVPNNAVLGNRTTPLRTLLLSPGTSEHRKIFTKRSLSPSKRGFKWKDNILANLNLKHGFQDATGSEPLSSDLGSLHGLAGNHSPPISARTPHVATVLRQLLELVDKHWNGSGSLLLNKKFLGKFEAKTGQSAGGKPHFVRKNSTVGGRCCHLNCEWATVTYL

SEQ ID NO: 5174 - protein, 523 aa, Homo Sapiens
MELGPSPAPRRLLFACSPPPASQPVVKALFGASAAGGLSPVTNLTVTMDQLQGLGSDYEQPLEVKNNSNLQRMGSSESTDSGFCLDSPGPLDSKENLENPMRRIHSLPQKLLGCSPALKRSHSDSLDHDIFQLIDPDENKENEAFEFKKPVRPVSRGCLHSHGLQEGKDLFTQRQNSAQLGMLSSNERDSSEPGNFIPLFTPQSPVTATLSDEDDGFVDLLDGENLKNEEETPSCMASLWTAPLVMRTTNLDNRCKLFDSPSLCSSSTRSVLKRPERSQEESPPGSTKRRKSMSGASPKESTNPEKAHETLHQSLSLASSPKGTIENILDNDPRDLIGDFSKGYLFHTVAGKHQDLKYISPEIMASVLNGKFANLIKEFVIIDCRYPYEYEGGHIKGAVNLHMEEEVEDFLLKKPIVPTDGKRVIVVFHCEFSSERGPRMCRYVRERDRLGNEYPKLHYPELYVLKGGYKEFFMKCQSYCEPPSYRPMHHEDFKEDLKKFRTKSRTWAGEKSKREMYSRLKKL

SEQ ID NO: 5175 - protein, 638 aa, Homo Sapiens
MDLWQLLLTLALAGSSDAFSGSEATAAILSRAPWSLQSVNPGLKTNSSKEPKFTKCRSPERETFSCHWTDEVHHGTKNLGPIQLFYTRRNTQEWTQEWKECPDYVSAGENSCYFNSSFTSIWIPYCIKLTSNGGTVDEKCFSVDEIVQPDPPIALNWTLLNVSLTGIHADIQVRWEAPRNADIQKGWMVLEYELQYKEVNETKWKMMDPILTTSVPVYSLKVDKEYEVRVRSKQRNSGNYGEFSEVLYVTLPQMSQFTCEEDFYFPWLLIIIFGIFGLTVMLFVFLFSKQQRIKMLILPPVPVPKIKGIDPDLLKEGKLEEVNTILAIHDSYKPEFHSDDSWVEFIELDIDEPDEKTEESDTDRLLSSDHEKSHSNLGVKDGDSGRTSCCEPDILETDFNANDIHEGTSEVAQPQRLKGEADLLCLDQKNQNNSPYHDACPATQQPSVIQAEKNKPQPLPTEGAESTHQAAHIQLSNPSSLSNIDFYAQVSDITPAGSVVLSPGQKNKAGMSQCDMHPEMVSLCQENFLMDNAYFCEADAKKCIPVAPHIKVESHIQPSLNQEDIYITTESLTTAAGRPGTGEHVPGSEMPVPDYTSIHIVQSPQGLILNATALPLPDKEFLSSCGYVSTDQLNKIMP

SEQ ID NO: 5176 - protein, 206 aa, Homo Sapiens
MTGSNMSDALANAVCQRCQARFSPAERIVNSNGELYHEHCFVCAQCFRPFPEGLFYEFEGRKYCEHDFQMLFAPCCGSCGEFIIGRVIKAKCEKPFLGHRHYEKKGLAYCETHYNQLFGDVCYNCSHVIEGDVVSALNKAWCVSCFSCSTCNSKLTLKNKFVEFDMKPVCKRCYEKFPLELKKRLKKLSELTSRKAQPKATDLNSA

SEQ ID NO: 5177 - protein, 412 aa, Homo Sapiens
MAAALLARASGPARRALCPRAWRQLHTIYQSVELPETHQMLLQTCRDFAEKELFPIAAQVDKEHLFPAAQVKKMGGLGLLAMDVPEELGGAGLDYLAYAIAMEEISRGCASTGVIMSVNNSLYLGPILKFGSKEQKQAWVTPFTSGDKIGCFALSEPGNGSDAGAASTTARAEGDSWVLNGTKAWITNAWEASAAVVFASTDRALQNKGISAFLVPMPTPGLTLGKKEDKLGIRGSSTANLIFEDCRIPKDSILGEPGMGFKIAMQTLDMGRIGIASQALGIAQTALDCAVNYAENRMAFGAPLTKLQVIQFKLADMALALESARLLTWRAAMLKDNKKPFIKEAAMAKLAASEAATAISHQAIQILGGMGYVTEMPAERHYRDARITEIYEGTSEIQRLVIAGHLLRSYRS

SEQ ID NO: 5178 - protein, 4 aa, Homo Sapiens
MRPP

SEQ ID NO: 5179 - protein, 382 aa, Homo Sapiens
  misc_feature (19)..(19): Xaa can be any naturally occurring amino acid
MALQGISVVELSGLAPGRXCAMVLADFGARVVRVDRPGSRYDVSRLGRGKRSLVLDLKQPREPRAAASVQAVGCAAGALPPRCHGETPAGPRDSAAGKSKAYLCQAEWIWPVQESFCRLAGHDINYLALSGVLSKIGRSGENPYAPLNLVADFAGGGLMCALGIIMALFDRTRTDKGQVIDANMVEGTAYLSSFLWKTQKSSLWEAPRGQNMLDGGAPFYTTYRTADGEFMAVGAIEPQFYELLIKGLGLKSDELPNQMSTDDWPEMKKKFADVFAKKTKAEWCQIFDGTDACVTPVLTFEEVVHHDHNKERGSFITSEEQDVSPRLAPLLLNTPAIPSSKGDPFIGEHTEEILEEFGFSREEIYQLNSDKIIESNKVKASL

SEQ ID NO: 5180 - protein, 690 aa, Homo Sapiens
MGAVARAHGGLRVARARESVAGGRHRGAGRPGARAAGAAAGLVRAEAGGRRAGRGRRPGRGLPTGGGGLAAAAVGREVAQGLCDAIRLDGGLDLLLRLLQAPELETRVQAARLLEQILVAENRDRVARIGLGVILNLAKEREPVELARSVAGILEHMFKHSEETCQRLVAAGGLDAVLYWCRRTDPALLRHCALALGNCALHGGQAVQRRMVEKRAAEWLFPLAFSKEDELLRLHACLAVAVLATNKEVEREVERSGTLALVEPLVASLDPGRFARCLVDASDTSQGRGPDDLQRLVPLLDSNRLEAQCIGAFYLCAEAAIKSLQGKTKVFSDIGAIQSLKRLVSYSTNGTKSALAKRALRLLGEEVPRPILPSVPSWKEAEVQTWLQQIGFSKYCESFREQQVDGDLLLRLTEEELQTDLGMKSGITRKRFFRELTELKTFANYSTCDRSNLADWLGSLDPRFRQYTYGLVSCGLDRSLLHRVSEQQLLEDCGIHLGVHRARILTAAREMLHSPLPCTGGKPSGDTPDVFISYRRNSGSQLASLLKVHLQLHGFSVFIDVEKLEAGKFEDKLIQSVMGARNFVLVLSPGALDKCMQDHDCKDWVHKEIVTALSCGKNIVPIIDGFEWPEPQVLPEDMQAVLTFNGIKWSHEYQEATIEKIIRFLQGRSSRDSSAGSDTSLEGAAPMGPT

SEQ ID NO: 5181 - protein, 584 aa, Homo Sapiens
MGNQMSVPQRVEDQENEPEAETYQDNASALNGVPVVVSTHTVQHLEEVDLGISVKTDNVATSSPETTEISAVADANGKNLGKEAKPEAPAAKSRFFLMLSRPVPGRTGDQAADSSLGSVKLDVSSNKAPANKDPSESWTLPVAAGPGQDTDKTPGHAPAQDKVLSAARDPTLLPPETGGAGGEAPSKPKDSSFFDKFFKLDKGQEKVPGDSQQEAKRAEHQDKVDEVPGLSGQSDDVPAGKDIVDGKEKEGQELGTADCSVPGDPEGLETAKDDSQAAAIAENNNSIMSFFKTLVSPNKAETKKDPEDTGAEKSPTTSADLKSDKANFTSQETQGAGKNSKGCNPSGHTQSVTTPEPAKEGTKEKSGPTSLPLGKLFWKKSVKEDSVPTGAEENVVCESPVEIIKSKEVESALQTVDLNEGDAAPEPTEAKLKREESKPRTSLMAFLRQMSVKGDGGITHSEEINGKDSSCQTSDSTEKTITPPEPEPTGAPQKGKEGSSKDKKSAAEMNKQKSNKQEAKEPAQCTEQATVDTNSLQNGDKLQKRPEKRQQSLGGFFKGLGPKRMLDAQVQTDPVSIGPVGKPK

SEQ ID NO: 5182 - protein, 681 aa, Homo Sapiens
MCGIFAYLNYHVPRTRREILETLIKGLQRLEYRGYDSAGVGFDGGNDKDWEANACKTQLIKKKGKVKALDEEVHKQQDMDLDIEFDVHLGIAHTRWATHGEPSPVNSHPQRSDKNNEFIVIHNGIITNYKDLKKFLESKGYDFESETDTETIAKLVKYMYDNRESQDTSFTTLVERVIQQLEGAFALVFKSVHFPGQAVGTRRGSPLLIGVRSEHKLSTDHIPILYRTGKDKKGSCNLSRVDSTTCLFPVEEKAVEYYFASDASAVIEHTNRVIFLEDDDVAAVVDGRLSIHRIKRTAGDHPGRAVQTLQMELQQIMKGNFSSFMQKEIFEQPESVVNTMRGRVNFDDYTVNLGGLKDHIKEIQRCRRLILIACGTSYHAGVATRQVLEELTELPVMVELASDFLDRNTPVFRDDVCFFLSQSGETADTLMGLRYCKERGALTVGITNTVGSSISRETDCGVHINAGPEIGVASTKAYTSQFVSLVMFALMMCDDRISMQERRKEIMLGLKRLPDLIKEVLSMDDEIQKLATELYHQKSVLIMGRGYHYATCLEGALKIKEITYMHSEGILAGELKHGPLALVDKLMPVIMIIMRDHTYAKCQNALQQVVARQGRPVVICDKEDTETIKNTKRTIKVPHSVDCLQGILSVIPLQLLAFHLAVLRGYDVDFPRNLAKSVTVE

SEQ ID NO: 5183 - protein, 417 aa, Homo Sapiens
MTTQLGPALVLGVALCLGCGQPLPQVPERPFSVLWNVPSAHCEARFGVHLPLNALGIIANRGQHFHGQNMTIFYKNQLGLYPYFGPRGTAHNGGIPQALPLDRHLALAAYQIHHSLRPGFAGPAVLDWEEWCPLWAGNWGRRRAYQAASWAWAQQVFPDLDPQEQLYKAYTGFEQAARALMEDTLRVAQALRPHGLWGFYHYPACGNGWHSMASNYTGRCHAATLARNTQLHWLWAASSALFPSIYLPPRLPPAHHQAFVRHRLEEAFRVALVGHRHPLPVLAYVRLTHRRSGRFLSQDDLVQSIGVSAALGAAGVVLWGDLSLSSSEEECWHLHDYLVDTLGPYVINVTRAAMACSHQRCHGHGRCARRDPGQMEAFLHLWPDGSLGDWKSFSCHCYWGWAGPTCQEPRPGPKEAV

SEQ ID NO: 5184 - protein, 1226 aa, Homo Sapiens
IRVIGERYHLSYKIVRTDSRLVRSILTAHGFHEVHPSSTDYNLMWTGSHLKPFLLRTLSEAQKVNHFPRSYELTRKDRLYKNIIRMQHTHGFKVFHILPQTFLLPAEYAEFCNSYSKDRGPWIVKPVASSRGRGVYLINNPNQISLEENILVSRYINNPLLIDDFKFDVRLYVLVTSYDPLVIYLYEEGLARFATVRYDQGAKNIRNQFMHLTNYSVNKKSGDYVSCDDPEVEDYGNKWSMSAMLRYLKQEGRDTTALMAHVEDLIIKTIISAELAIATACKTFVPHRSSCFELYGFDVLIDSTLKPWLLEVNLSPSLACDAPLDLKIKASMISDMFTVVGFVCQDPAQRASTRPIYPTFESSRRNPFQKPQRCRPLSASDAEMKNLVGSAREKGPGKLGGSVLGLSMEEIKVLRRVKEENDRRGGFIRIFPTSETWEIYGSYLEHKTSMNYMLATRLFQDRMTADGAPELKIESLNSKAKLHAALYERKLLSLEVRKRRRRSSRLRAMRPKYPVITQPAEMNVKTETESEEEEEVALDNEDEEQEASQEESAGFLRENQAKYTPSLTALVENTPKENSMKVREWNNKGGHCCKLETQELEPKFNLMQILQDNGNLSKMQARIAFSAYLQHVQIRLMKDSGGQTFSASWAAKEDEQMELVVRFLKRASNNLQHSLRMVLPSRRLALLERRRILAHQLGDFIIVYNKETEQMAEKKSKKKVEEEEEDGVNMENFQEFIRQASEAELEEVLTFYTQKNKSASVFLGTHSKISKNNNNYSDSGAKGDHPETIMEEVKIKPPKQQQTTEIHSDKLSRFTTSAEKEAKLVYSNSSSGPTATLQKIPNTHLSSVTTSDLSPGPCHHSSLSQIPSAIPSMPHQPTILLNTVSASASPCLHPGAQNIPSPTGLPRCRSGSHTIGPFSSFQSAAHIYSQKLSRPSSAKAGSCYLNKHHSGIAKTQKEGEDASLYSKRYNQSMVTAELQRLAEKQAARQYSPSSHINLLTQQVTNLNLATGIINRSSASAPPTLRPIISPSGPTWSTQSDPQAPENHSSSPGSRSLQTGGFAWEGEVENNVYSQATGVVPQHKYHPTAGSYQLQFALQQLEQQKLQSRQLLDQSRARHQAIFGSQTLPNSNLWTMNNGAGCRISSATASGQKPTTLPQKVVPPPSSCASLVPKPPPNHEQVLRRATSQKASKGSSAEGQLNGLQSSLNPAASVPITSSTDPAHTKI

SEQ ID NO: 5185 - protein, 478 aa, Homo Sapiens
MPPMPSAPPVHPPPDGGWGWIVVGAAFISIGFSYAFPKAVTVFFKEIQQIFHTTYSEIAWISSIMLAVMYAGGPVSSVLVNKYGSRPVVIAGGLLCCLGMVLASFSSSVVQLYLTMGFITGLGLAFNLQPALTIIGKYFYRKRPMANGLAMAGSPVFLSSLAPFNQYLFNTFGWKGSFLILGSLLLNACVAGSLMRPLGPNQTTSKSKNKTGKTEDDSSPKKIKTKKSTWEKVNKYLDFSLFKHRGFLIYLSGNVIMFLGFFAPIIFLAPYAKDQGIDEYSAAFLLSVMAFVDMFARPSVGLIANSKYIRPRIQYFFSFAIMFNGVCHLLCPLAQDYTSLVLYAVFFGLGFGSVSSVLFETLMDLVGAPRFSSAVGLVTIVECGPVLLGPPLAGKLVDLTGEYKYMYMSCGAIVVAASVWLLIGNAINYRLLAKERKEENARQKSRESEPLSKSKHSEDVNVKVSNAQSVTSERETNI

SEQ ID NO: 5186 - protein, 636 aa, Homo Sapiens
MRGGRGAPFWLWPLPKLALLPLLWVLFQRTRPQGSAGPLQCYGVGPLGDLNCSWEPLGDLGAPSELHLQSQKYRSNKTQTVAVAAGRSWVAIPREQLTMSDKLLVWGTKAGQPLWPPVFVNLETQMKPNAPRLGPDVDFSEDDPLEATVHWAPPTWPSHKVLICQFHYRRCQEAAWTLLEPELKTIPLTPVEIQDLELATGYKVYGRCRMEKEEDLWGEWSPILSFQTPPSAPKDVWVSGNLCGTPGGEEPLLLWKAPGPCVQVSYKVWFWVGGRELSPEGITCCCSLIPSGAEWARVSAVNATSWEPLTNLSLVCLDSASAPRSVAVSSIAGSTELLVTWQPGPGEPLEHVVDWARDGDPLEKLNWVRLPPGNLSALLPGNFTVGVPYRITVTAVSASGLASASSVWGFREELAPLVGPTLWRLQDAPPGTPAIAWGEVPRHQLRGHLTHYTLCAQSGTSPSVCMNVSGNTQSVTLPDLPWGPCELWVTASTIAGQGPPGPILRLHLPDNTLRWKVLPGILFLWGLFLLGCGLSLATSGRCYHLRHKVLPRWVWEKVPDPANSSSGQPHMEQVPEAQPLGDLPILEVEEMEPPPVMESSQPAQATAPLDSGYEKHFLPTPEELGLLGPPRPQVLA

SEQ ID NO: 5187 - protein, 471 aa, Homo Sapiens
MAKKVAVIGAGVSGLISLKCCVDEGLEPTCFERTEDIGGVWRFKENVEDGRASIYQSVVTNTSKEMSCFSDFPMPEDFPNFLHNSKLLEYFRIFAKKFDLLKYIQFQTTVLSVRKCPDFSSSGQWKVVTQSNGKEQSAVFDAVMVCSGHHILPHIPLKSFPGMERFKGQYFHSRQYKHPDGFEGKRILVIGMGNSGSDIAVELSKNAAQVFISTRHGTWVMSRISEDGYPWDSVFHTRFRSMLRNVLPRTAVKWMIEQQMNRWFNHENYGLEPQNKYIMKEPVLNDDVPSRLLCGAIKVKSTVKELTETSAIFEDGTVEENIDVIIFATGYSFSFPFLEDSLVKVENNMVSLYKYIFPAHLDKSTLACIGLIQPLGSIFPTAELQARWVTRVFKGLCSLPSERTMMMDIIKRNEKRIDLFGESQSQTLQTNYVDYLDELALEIGAKPDFCSLLFKDPKLAVRLYFGPCNSY

SEQ ID NO: 5188 - protein, 814 aa, Homo Sapiens
MGLPALEFSDCCLDSPHFRETLKSHEAELDKTNKFIKELIKDGKSLISALKNLSSAKRKFADSLNEFKFQCIGDAETDDEMCIARSLQEFATVLRNLEDERIRMIENASEVLITPLEKFRKEQIGAAKEAKKKYDKETEKYCGILEKHLNLSSKKKESQLQEADSQVDLVRQHFYEVSLEYVFKVQEVQERKMFEFVEPLLAFLQGLFTFYHHGYELAKDFGDFKTQLTISIQNTRNRFEGTRSEVESLMKKMKENPLEHKTISPYTMEGYLYVQEKRHFGTSWVKHYCTYQRDSKQITMVPFDQKSGGKGGEDESVILKSCTRRKTDSIEKRFCFDVEAVDRPGVITMQALSEEDRRLWMEAMDGREPVYNSNKDSQSEGTAQLDSIGFSIIRKCIHAVETRGINEQGLYRIVGVNSRVQKLLSVLMDPKTASETETDICAEWEIKTITSALKTYLRMLPGPLMMYQFQRSFIKAAKLENQESRVSEIHSLVHRLPEKNRQMLQLLMNHLANVANNHKQNLMTVANLGVVFGPTLLRPQEETVAAIMDIKFQNIVIEILIENHEKIFNTVPDMPLTNAQLHLSRKKSSDSKPPSCSERPLTLFHTVQSTEKQEQRNSIINSSLESVSSNPNSILNSSSSLQPNMNSSDPDLAVVKPTRPNSLPPNPSPTSPLSPSWPMFSAPSSPMPTSSTSSDSSPVRSVAGFVWFSVAAVVLSLARSSLHAVFSLLVNFVPCHPNLHLLFDRPEEAVHEDSSTPFRKAKALYACKAEHDSELSFTAGTVFDNVHPSQEPGWLEGTLNGKTGLIPENYVEFL

SEQ ID NO: 5189 - protein, 1840 aa, Homo Sapiens
DPCGSRPAPEGAGAGPEQGHSAGGGGWCRHCHTKLVELKRQAWKLVSGPGTTLRDPCLSALLLDKLPAPGALPACRPEAERRCDVCATHLQQLTREAMHLLQAPASHEDLDAPHGGPSLAPPSTTTSSRDTPGPAGPAGRQPGRAGPDRTKGLAWSPGPSVQVSVAPAGLGGALSTVTIQAQQCLEGMWSVSRVNSFLPPACLAEAAVAAVAVADTVRECPPVAGPDGLSKAWGRGGVCTSALVTPTPGSVGGSTGPSAAASFFIRAMQKLSLASKRKKPHPPPPPATRGTSTYPTDFSGVLQLWPPPAPPCLLRAASKTKDNPGSIGKVKVMLRIWPAQGAQRSAEAMSFLKVDPRKKQVILYDPAAGPPGSAGPRRAATAAVPKMFAFDAVFPQDSEQAEVCSGTVADVLQSVVSGADGCIFSFGHMSLGKSYTMIGKDSSPQSLGIVPCAISWLFRLIEERRERTGTRFSVRVSAVEVCGRDQSLRDLLAEVAPGSLQDTQSPGVYLREDPVCGAQLQNQSELRAPTAEKAAFYLDAALAARSTSRAGCGEDARRSSHMLFTLHVYQYRMEKCGRGGMSGGRSRLHLIDLGSCEAAAGRAGEAAGGPLCLSLSALGSVILALVNGAKHVPYRDHRLTMLLRESLATAGCRTTMIAHVSDAPAQHAETLSTVQLAARIHRLRRKKAKYASSSSGGESSCEEGRARRPPHLRPFHPRTVALDPDRTPPCLPGDPDYSSSSEQSCDTVIYVGPGGAALSDRELTDNEGPPDFVPIIPALSRHRPSKGPRDADHFRCSTFAELQERLECMDGNEGPSGGPGGTDGAQASPARGGRKPSPPEAASPRKAVGTPMAASTPRGSSGPDTHQGTPEPCKAIVWGDQREDSSAWPELLVPEKAAVSGGRRPLPSPAPPPPQLLEACRAPEEPGGGGTDGVARTPPVGMSGQVAGSPMLPGATCPRLAAGSRCPERGLLTTTVTLQRPVELNGEDELVFTVVEELSLGALAGAGRPTSLASFDSDCSLRALASGSRPVSIISSINDEFDAYTSQAPEGGPLEGAAWAGSSHGSSISSWLSEVSVCTADSRDPTPQPRFSPDSLAGLDPGGPPALDGSLGDGSSGFLGPDRPDSPGPTWGPCPGEVAAVAPSRPGREPQAGPSRWASAAQTIHSSLPRKPRTASATTRVGCARLGQSPPGRGGLFEDPWLLRVGECDTQAASAGRAPSPTLGSPRLPEAQVMLACAQRVVDGCEVAARAARRPEAVARIPPLRRGATTLGVTTPAVSWGDAPTEVVACSGSLKASPTSKKGLAPKAGFLPRPSGAAPPAPPTRKSSLEQRSSPASAPPHAVNPARVGAAAVLRGEEEPRPSSRADHSVPRATSSLKARASKVEAAHRLAGHASLERYEGLAHSSSKGREAPGRPPRAVPKLGVPPSSPTHGPAPACRSGAAKAVGAPKPPVGGGKGRGLVAGGSRALGPSVKLSTASVTGRSPGGPVAGPRAAPRAGPSVGAKAGRGTVMGTKQALRAAHSRVHELSASGAPGRGGSSWGSADSDSGHDSGVNVGEERPPTGPALPSPYSKVTAPRRPQRYSSGHGSDNSSVLSGELPPAMGRTALFHHSGGSSGYESLRRDSEATGSASSAPDSMSESGAASPGARTRSLKSPKKRATGLQRRRLIPAPLPDTTALGRKPSLPGQWVDLPPPLAGSLKEPFEIKVYEIDDVERLQRPRPTPREAPTQGLACVSTRLRLAERRQQRLREVQAKHKHLCEELAETQGRLMLEPGRWLEQFEVDPELEPESAEYLAALERATAALEQCVNLCKAHVMMVTCFDISVAASAAIPGPQEVDV

SEQ ID NO: 5190 - protein, 209 aa, Homo Sapiens
MALLAEHLLKPLPADKQIETGPFLEAVSHLPPFFDCLGSPVFTPIKADISGNITKIKAVYDTNPAKFRTLQNILEVEKEMYGAEWPKVGATLALMWLKRGLRFIQVFLQSICDGERDENHPNLIRVNATKAYEMALKKYHGWIVQKIFQAALYAAPYKSDFLKALSKGQNVTEEECLEKIRLFLVNYTATIDVIYEMYTQMNAELNYKV

SEQ ID NO: 5191 - protein, 404 aa, Homo Sapiens
MEAGEEPLLLAELKPGRPHQFDWKSSCETWSVAFSPDGSWFAWSQGHCIVKLIPWPLEEQFIPKGFEAKSRSSKNETKGRGSPKEKTLDCGQIVWGLAFSPWPSPPSRKLWARHHPQVPDVSCLVLATGLNDGQIKIWEVQTGLLLLNLSGHQDVVRDLSFTPSGSLILVSASRDKTLRIWDLNKHGKQIQVLSGHLQWVYCCSISPDCSMLCSAAGEKSVFLWSMRSYTLIRKLEGHQSSVVSCDFSPDSALLVTASYDTNVIMWDPYTGERLRSLHHTQVDPAMDDSDVHISSLRSVCFSPEGLYLATVADDRLLRIWALELKTPIAFAPMTNGLCCTFFPHGGVIATGTRDGHVQFWTAPRVLSSLKHLCRKALRSFLTTYQVLALPIPKKMKEFLTYRTF

SEQ ID NO: 5192 - protein, 272 aa, Homo Sapiens
MDSYLLMWGLLTFIMVPGCQAELCDDDPPEIPHATFKAMAYKEGTMLNCECKRGFRRIKSGSLYMLCTGNSSHSSWDNQCQCTSSATRNTTKQVTPQPEEQKERKTTEMQSPMQPVDQASLPGHCREPPPWENEATERIYHFVVGQMVYYQCVQGYRALHRGPAESVCKMTHGKTRWTQPQLICTGEMETSQFPGEEKPQASPEGRPESETSCLVTTTDFQIQTEMAATMETSIFTTEYQVAVAGCVFLLISVLLLSGLTWQRRQRKSRRTI

SEQ ID NO: 5193 - protein, 575 aa, Homo Sapiens
AHPSSKIESLRVTVDFLKVPLGLKKPVLKEVAVGPPKRPQPAALERYKARRSDAMDTESQYSGYSYKSGHSRSSRKHRDRRDRHRSKSRDGGRGDKSVTIQAPGEPLLDNESTRGDERDDNWGETTTVVTGTSEHSISHDDLTRIAKDMEDSVPLDCSRHLGVAAGATLALLSFLTPLAFLLLPPLLWREELEPCGTACEGLFISVAFKLLILLLGSWALFFRRPKASLPRVFVLRALLMVLVFLLVVSYWLFYGVRILDARERSYQGVVQFAVSLVDALLFVHYLAVVLLELRQLQPQFTLKVVRSTDGASRFYNVGHLSIQRVAVWILEKYYHDFPVYNPALLNLPKSVLAKKVSGFKVYSLGEENSTNNSTGQSRAVIAAAARRRDNSHNEYYYEEAEHERRVRKRRARLVVAVEEAFTHIKRLQEEEQKNPREVMDPREAAQAIFASMARAMQKYLRTTKQQPYHTMESILQHLEFCITHDMTPKAFLERYLAAGPTIQYHKERWLAKQWTLVSEEPVTNGLKDGIVFLLKRQDFSLVVSTKKVPFFKLSEEFVDPKSHKFVMRLQSETSV

SEQ ID NO: 5194 - protein, 328 aa, Homo Sapiens
MAQHHLWILLLCLQTWPEAAGKDSEIFTVNGILGESVTFPVNIQEPRQVKIIAWTSKTSVAYVTPGDSETAPVVTVTHRNYYERIHALGPNYNLVISDLRMEDAGDYKADINTQADPYTTTKRYNLQIYRRLGKPKITQSLMASVNSTCNVTLTCSVEKEEKNVTYNWSPLGEEGNVLQIFQTPEDQELTYTCTAQNPVSNNSDSISARQLCADIAMGFRTHHTGLLSVLAMFFLLVLILSSVFLFRLFKRRQDAASKKTIYTYIMASRNTQPAESRIYDEILQSKVLPSKEEPVNTVYSEVQFADKMGKASTQDSKPPGTSSYEIVI

SEQ ID NO: 5195 - protein, 1119 aa, Homo Sapiens
MKCSLRKMWRPGEKKEPQGVVYEDVPDDTEDFKESLKVVFEGSAYGLQNFNKQKKLKTCDDMDTFFLHYAAAEGQIELMEKITRDSSLEVLHEMDDYGNTPLHCAVEKNQIESVKFLLSRGANPNLRNFNMMAPLHIAVQGMNNEVMKVLLEHRTIDVNLEGENGNTAVIIACTTNNSEALQILLNKGAKPCKSNKWGCFPIHQAAFSGSKECMEIILRFGEEHGYSRQLHINFMNNGKATPLHLAVQNGDLEMIKMCLDNGAQIDPVEKGRCTAIHFAATQGATEIVKLMISSYSGSVDIVNTTDGCHETMLHRASLFDHHELADYLISVGADINKIDSEGRSPLILATASASWNIVNLLLSKGAQVDIKDNFGRNFLHLTVQQPYGLKNLRPEFMQMQQIKELVMDEDNDGCTPLHYACRQGGPGSVNNLLGFNVSIHSKSKDKKSPLHFAASYGRINTCQRLLQDISDTRLLNEGDLHGMTPLHLAAKNGHDKVVQLLLKKGALFLSDHNGWTALHHASMGGYTQTMKVILDTNLKCTDRLDEDGNTALHFAAREGHAKAVALLLSHNADIVLNKQQASFLHLALHNKRKEVVLTIIRSKRWDECLKIFSHNSPGNKCPITEMIEYLPECMKVLLDFCMLHSTEDKSCRDYYIEYNFKYLQCPLEFTKKTPTQDVIYEPLTALNAMVQNNRIELLNHPVCKEYLLMKWLAYGFRAHMMNLGSYCLGLIPMTILVVNIKPGMAFNSTGIINETSDHSEILDTTNSYLIKTCMILVFLSSIFGYCKEAGQIFQQKRNYFMDISNVLEWIIYTTGIIFVLPLFVEIPAHLQWQCGAIAVYFYWMNFLLYLQRFENCGIFIVMLEVILKTLLRSTVVFIFLLLAFGLSFYILLNLQDPFSSPLLSIIQTFSMMLGDINYRESFLEPYLRNELAHPVLSFAQLVSFTIFVPIVLMNLLIGLAVGDIAEVQKHASLKRIAMQVELHTSLEKKLPLWFLRKVDQKSTIVYPNKPRSGGMLFHIFCFLFCTGEIRQEIPNADKSLEMEILKQKYRLKDLTFLLEKQHELIKLIIQKMEIISETEDDDSHCSFQDRFKKEQMEQRNSRWNTVLRAVKAKTHHLEP

SEQ ID NO: 5196 - protein, 1523 aa, Homo Sapiens
VQTLGGWVQPETRTKEEIIELLVLEQYLTIIPEKLKPWVRAKKPENCEKLVTLLENYKEMYQPEDDNNSDVTSDDDMTRNRRESSPPHSVHSFSGDRDWDRRGRSRDMEPRDRWSHTRNPRSRMPPRDLSLPVVAKTSFEMDREDDRDSRAYESRSQDAESYQNVVDLAEDRKPHNTIQDNMENYRKLLSLGVQLAEDDGHSHMTQGHSSRSKRSAYPSTSRGLKTMPEAKKSTHRRGICEDESSHGVIMEKFIKDVSRSSKSGRARESSDRSQRFPRMSDDNWKDISLNKRESVIQQRVYEGNAFRGGFRFNSTLVSRKRVLERKRRYHFDTDGKGSIHDQKGCPRKKPFECGSEMRKAMSVSSLSSLSSPSFTESQPIDFGAMPYVCDECGRSFSVISEFVEHQIMHTRENLYEYGESFIHSVAVSEVQKSQVGGKRFECKDCGETFNKSAALAEHRKIHARGYLVECKNQECEEAFMPSPTFSELQKIYGKDKFYECRVCKETFLHSSALIEHQKIHFGDDKDNEREHERERERERGETFRPSPALNEFQKMYGKEKMYECKVCGETFLHSSSLKEHQKIHTRGNPFENKGKVCEETFIPGQSLKRRQKTYNKEKLCDFTDGRDAFMQSSELSEHQKIHSRKNLFEGRGYEKSVIHSGPFTESQKSHTITRPLESDEDEKAFTISSNPYENQKIPTKENVYEAKSYERSVIHSLASVEAQKSHSVAGPSKPKVMAESTIQSFDAINHQRVRAGGNTSEGREYSRSVIHSLVASKPPRSHNGNELVESNEKGESSIYISDLNDKRQKIPARENPCEGGSKNRNYEDSVIQSVFRAKPQKSVPGEGSGEFKKDGEFSVPSSNVREYQKARAKKKYIEHRSNETSVIHSLPFGEQTFRPRGMLYECQECGECFAHSSDLTEHQKIHDREKPSGSRNYEWSVIRSLAPTDPQTSYAQEQYAKEQARNKCKDFRQFFATSEDLNTNQKIYDQEKSHGEESQGENTDGEETHSEETHGQETIEDPVIQGSDMEDPQKDDPDDKIYECEDCGLGFVDLTDLTDHQKVHSRKCLVDSREYTHSVIHTHSISEYQRDYTGEQLYECPKCGESFIHSSFLFEHQRIHEQDQLYSMKGCDDGFIALLPMKPRRNRAAERNPALAGSAIRCLLCGQGFIHSSALNEHMRLHREDDLLEQSQMAEEAIIPGLALTEFQRSQTEERLFECAVCGESFVNPAELADHVTVHKNEPYEYGSSYTHTSFLTEPLKGAIPFYECKDCGKSFIHSTVLTKHKELHLEEEEEDEAAAAAAAAAQEVEANVHVPQVVLRIQGLNVEAAEPEVEAAEPEVEAAEPEVEAAEPNGEAEGPDGEAAEPIGEAGQPNGEAEQPNGDADEPDGAGIEDPEERAEEPEGKAEEPEGDADEPDGVGIEDPEEGEDQEIQVEEPYYDCHECTETFTSSTAFSEHLKTHASMIIFEPANAFGECSGYIERASTSTGGANQADEKYFKCDVCGQLFNDRLSLARHQNTHTG

SEQ ID NO: 5197 - protein, 268 aa, Homo Sapiens
MAVFADLDLRAGSDLKALRGLVETAAHLGYSVVAINHIVDFKEKKQEIEKPVAVSELFTTLPIVQGKSRPIKILTRLTIIVSDPSHCNVLRATSSRARLYDVVAVFPKTEKLFHIACTHLDVDLVCITVTEKLPFYFKRPPINVAIDRGLAFELVYSPAIKDSTMRRYTISSALNLMQICKGKNVIISSAAERPLEIRGPYDVANLGLLFGLSESDAKAAVSTNCRAALLHGETRKTAFGIISTVKKPRPSEGDEDCLPASKKAKCEG

SEQ ID NO: 5198 - protein, 320 aa, Homo Sapiens
MEVEAVCGGAGEVEAQDSDPAPAFSKAPGSAGHYELPWVEKYRPVKLNEIVGNEDTVSRLEVFAREGNVPNIIIAGPPGTGKTTSILCLARALLGPALKDAMLELNASNDSMTDGAQQALRRTMEIYSKTTRFALACNASDKIIEPIQSRCAVLRYTKLTDAQILTRLMNVIEKERVPYTDDGLEAIIFTAQGDMRQALNNLQSTFSGFGFINSENVFKVCDEPHPLLVKEMIQHCVNANIDEAYKILAHLWHLGYSPEDIIGNIFRVCKTFQMAEYLKLEFIKEIGYTHMKIAEGVNSLLQMAGLLARLCQKTMAPVAS

SEQ ID NO: 5199 - protein, 169 aa, Homo Sapiens
MSSYQQKQTFTPPPQLQQQQVKQPSQPPPQEIFVPTTKEPCHSKVPQPGNTKIPEPGCTKVPEPGCTKVPEPGCTKVPEPGCTKVPEPGCTKVPEPGCTKVPEPGYTKVPEPGSIKVPDQGFIKFPEPGAIKVPEQGYTKVPVPGYTKLPEPCPSTVTPGPAQQKTKQK

SEQ ID NO: 5200 - protein, 247 aa, Homo Sapiens
MASLSRPSLPSCLCSFLLLLLLQVSSSYAGQFRVIGPRHPIRALVGDEVELPCRISPGKNATGMEVGWYRPPFSRVVHLYRNGKDQDGDQAPEYRGRTELLKDAIGEGKVTLRIRNVRFSDEGGFTCFFRDHSYQEEAAMELKVEDPFYWVSPGVLVLLAVLPVLLLQITLGLVFLCLQYRLRGKLRAEIENLHRTFDPHFLRVPCWKITLFVIVPVLGPLVALIICYNWLHRRLAGQFLEELRNPF

SEQ ID NO: 5201 - protein, 76 aa, Homo Sapiens
MFGACYKQPLKPSGSEPPAEECRMTPRHAGCDVTEMQRILSQPTFTEHLLRAVLSTERGPYPDPKRAFLDLLQERI

SEQ ID NO: 5202 - protein, 364 aa, Homo Sapiens
MSEVEAAAVATAVPAATVPATAAGVVAVVVPVPAGEPQKGGGAGGGGGAASGPAAGTPSAPGSRTPGNPATAVSGTPAPPARSQADKPVLAIQVLGTVKWFNVRNGYGFINRNDTKEDVFVHQTAIKRNNPRKFLRSVGDGETVEFDVVEGEKGAEATNVTGPGGVPVKGSRYAPNRRKSRRFIPRPPSVAPPPMVAEIPSAGTGPGSKGERAEDSGQRPRRWCPPPFFYRRRFVRGPRPPNQQQPIEGTDRVEPKETAPLEGHQQQGDERVPPPRFRPRYRRPFRPRPRQQPTTEGGDGETKPSQGPADGSRPEPQRPRNRPYFQRRRQQAPGPQQAPGPRQPAAPETSAPVNSGDPTTTILE

SEQ ID NO: 5203 - protein, 763 aa, Homo Sapiens
MNQKTILVLLILAVITIFALVCVLLVGRGGDGGEPSQLPHCPSVSPSAQPWTHPGQSQLFADLSREELTAVMRFLTQRLGPGLVDAAQARPSDNCVFSVELQLPPKAAALAHLDRGSPPPAREALAIVFFGRQPQPNVSELVVGPLPHPSYMRDVTVERHGGPLPYHRRPVLFQEYLDIDQMIFNRELPQASGLLHHCCFYKHRGRNLVTMTTAPRGLQSGDRATWFGLYYNISGAGFFLHHVGLELLVNHKALDPARWTIQKVFYQGRYYDSLAQLEAQFEAGLVNVVLIPDNGTGGSWSLKSPVPPGPAPPLQFYPQGPRFSVQGSRVASSLWTFSFGLGAFSGPRIFDVRFQGERLVYEISLQEALAIYGGNSPAAMTTRYVDGGFGMGKYTTPLTRGVDCPYLATYVDWHFLLESQAPKTIRDAFCVFEQNQGLPLRRHHSDLYSHYFGGLAETVLVVRSMSTLLNYDYVWDTVFHPSGAIEIRFYATGYISSAFLFGATGKYGNQVSEHTLGTVHTHSAHFKVDLDVAGLENWVWAEDMVFVPMAVPWSPEHQLQRLQVTRKLLEMEEQAAFLVGSATPRYLYLASNHSNKWGHPRGYRIQMLSFAGEPLPQNSSMARGFSWERYQLAVTQRKEEEPSSSSVFNQNDPWAPTVDFSDFINNETIAGKDLVAWVTAGFLHIPHAEDIPNTVTVGNGVGFFLRPYNFFDEDPSFYSADSIYFRGDQDAGACEVNPLACLPQAAACAPDLPAFSHGGFSHN

SEQ ID NO: 5204 - protein, 890 aa, Homo Sapiens
MSANNSPPSAQKSVLPTAIPAVLPAASPCSSPKTGLSARLSNGSFSAPSLTNSRGSVHTVSFLLQIGLTRESVTIEAQELSLSAVKDLVCSIVYQKFPECGFFGMYDKILLFRHDMNSENILQLITSADEIHEGDLVEVVLSALATVEDFQIRPHTLYVHSYKAPTFCDYCGEMLWGLVRQGLKCEGCGLNYHKRCAFKIPNNCSGVRKRRLSNVSLPGPGLSVPRPLQPEYVALPSEESHVHQEPSKRIPSWSGRPIWMEKMVMCRVKVPHTFAVHSYTRPTICQYCKRLLKGLFRQGMQCKDCKFNCHKRCASKVPRDCLGEVTFNGEPSSLGTDTDIPMDIDNNDINSDSSRGLDDTEEPSPPEDKMFFLDPSDLDVERDEEAVKTISPSTSNNIPLMRVVQSIKHTKRKSSTMVKEGWMVHYTSRDNLRKRHYWRLDSKCLTLFQNESGSKYYKEIPLSEILRISSPRDFTNISQGSNPHCFEIITDTMVYFVGENNGDSSHNPVLAATGVGLDVAQSWEKAIRQALMPVTPQASVCTSPGQGKDHKDLSTSISVSNCQIQENVDISTVYQIFADEVLGSGQFGIVYGGKHRKTGRDVAIKVIDKMRFPTKQESQLRNEVAILQNLHHPGIVNLECMFETPERVFVVMEKLHGDMLEMILSSEKSRLPERITKFMVTQILVALRNLHFKNIVHCDLKPENVLLASAEPFPQVKLCDFGFARIIGEKSFRRSVVGTPAYLAPEVLRSKGYNRSLDMWSVGVIIYVSLSGTFPFNEDEDINDQIQNAAFMYPPNPWREISGEAIDLINNLLQVKMRKRYSVDKSLSHPWLQDYQTWLDLREFETRIGERYITHESDDARWEIHAYTHNLVYPKHFIMAPNPDDMEEDP

SEQ ID NO: 5205 - protein, 1338 aa, Homo Sapiens [sequence omitted]

SEQ ID NO: 5206 - protein, 153 aa, Homo Sapiens
MPYVFSFKMPQEQGQMFQYYPVYMVLPWEQPQQTVPRSPQQTRQQQYEEQIPFYAQFGYIPQLAEPAISGGQQQLAFDPQLGTAPEIAVMSTGEETPYLQKEAINFRHDSAGVFMPSTSPKPSTTNVFTSAVDQTITPELPEEKDKTDSLREP

SEQ ID NO: 5207 - protein, 204 aa, Homo Sapiens
MGEAEVGGGGAAGDKGPGEAATSPAEETVVWSPEVEVCLFHAMLGHKPVGVNRHFHMICIRDKFSQNIGRQVPSKVIWDHLSTMYDMQALHESEILPFPNPERNFVLPEEIIQEVREGKVMIEEEMKEEMKEDVDPHNGADDVFSSSGSLGKASEKSSKDKEKNSSDLGCKEGADKRKRSRVTDKVLTANSNPSSPSAAKRRRT

SEQ ID NO: 5208 - protein, 340 aa, Homo Sapiens
EKALLGACDCTQIVKPSGVHLKLVLRFSDFGKAMFKPMRQQRDEETPVDFFYFIDFQRHNAEIAAFHLDRILDFRRVPPTVGRIVNVTKEILEVTKNEILQSVFFVSPASNVCFFAKCPYMCKTEYAVCGNPHLLEGSLSAFLPSLNLAPRLSVPNPWIRSYTLAGKEEWEVNPLYCDTVKQIYPYNNSQRLLNVIDMAIFDFLIGNMDRHHYEMFTKFGDDGFLIHLDNARGFGRHSHDEISILSPLSQCCMIKKKTLLHLQLLAQADYRLSDVMRESLLEDQLSPVLTEPHLLALDRRLQTILRTVEGCIVAHGQQSVIVDGPVEQSAPDSGQANLTS

SEQ ID NO: 5209 - protein, 252 aa, Homo Sapiens
FHSIGVQVEEDKRRARFKRSNSVTAGVQADLELEGLAGLATVATEDKALQFGRSFQRHASEPQPGPRAPTYSVFRTVHTQGQWAYREGYPLPYEPPATDGSPGPAPAPTPGPGAGRRDSWIERGSRSLPDSGRASPCPRDGEWFIKMLRAEVEKLEHWCQQMEREAEDYELPEEILEKIPQCCGQHTTSPVPEGSAVLPAVSAKHGSHCVPCAHLPGPGGFLGPPTALHRGCDPQVPGATATQGQQLETPGA

SEQ ID NO: 5210 - protein, 189 aa, Homo Sapiens
MTDSVIYSMLELPTATQAQNDYGPQQKSSSSRPSCSCLVAIALGLLTAVLLSVLLYQWILCQGSNYSTCASCPSCPDRWMKYGNHCYYFSVEEKDWNSSLEFCLARDSHLLVITDNQEMSLLQVFLSEAFCWIGLRNNSGWRWEDGSPLNFSRISSNSFVQTCGAINKNGLQASSCEVPLHWVCKKVRL

SEQ ID NO: 5211 - protein, 197 aa, Homo Sapiens
MSSAPAPGPAPASLTLWDEEDFQGRRCRLLSDCANVCERGGLPRVRSVKVENGVWVAFEYPDFQGQQFILEKGDYPRWSAWSGSSSHNSNQLLSFRPVLCANHNDSRVTLFEGDNFQGCKFDLVDDYPSLPSMGWASKDVGSLKVSSGAWVAYQYPGYRGYQYVLERDRHSGEFCTYGELGTQAHTGQLQSIRRVQH

SEQ ID NO: 5212 - protein, 143 aa, Homo Sapiens
MSGRGKTGGKARAKAKSRSSRAGLQFPVGRVHRLLRKGHYAERVGAGAPVYLAAVLEYLTAEILELAGNAARDNKKTRIIPRHLQLAIRNDEELNKLLGGVTIAQGGVLPNIQAVLLPKKTSATVGPKAPSGGKKATQASQEY

SEQ ID NO: 5213 - protein, 626 aa, Homo Sapiens
MIFLTALPLFWIMISASRGGHWGAWMPSSISAFEGTCVSIPCRFDFPDELRPAVVHGVWYFNSPYPKNYPPVVFKSRTQVVHESFQGRSRLLGDLGLRNCTLLLSNVSPELGGKYYFRGDLGGYNQYTFSEHSVLDIVNTPNIVVPPEVVAGTEVEVSCMVPDNCPELRPELSWLGHEGLGEPAVLGRLREDEGTWVQVSLLHFVPTREANGHRLGCQASFPNTTLQFEGYASMDVKYPPVIVEMNSSVEAIEGSHVSLLCGADSNPPPLLTWMRDGTVLREAVAESLLLELEEVTPAEDGVYACLAENAYGQDNRTVGLSVMYAPWKPTVNGTMVAVEGETVSILCSTQSNPDPILTIFKEKQILSTVIYESELQLELPAVSPEDDGEYWCVAENQYGQRATAFNLSVEFAPVLLLESHCAAARDTVQCLCVVKSNPEPSVAFELPSRNVTVNESEREFVYSERSGLVLTSILTLRGQAQAPPRVICTARNLYGAKSLELPFQGAHRLMWAKIGPVGAVVAFAILIAIVCYITQTRRKKNVTESPSFSAGDNPPVLFSSDFRISGAPEKYESERRLGSERRLLGLRGEPPELDLSYSHSDLGKRPTKDSYTLTEELAEYAEIRVK

SEQ ID NO: 5214 - protein, 549 aa, Homo Sapiens
MASASSGPSSSVGFSSFDPAVPSCTLSSASGIKRPMASEVPYASGMPIKKIGHRSVDSSGETTYKKTTSSALKGAIQLGITHTVGSLSTKPERDVLMQDFYVVESIFFPSEGSNLTPAHHYNDFRFKTYAPVAFRYFRELFGIRPDDYLYSLCSEPLIELCSSGASGSLFYVSSDDEFIIKTVQHKEAEFLQKLLPGYYMNLNQNPRTLLPKFYGLYCVQAGGKNIRIVVMNNLLPRSVKMHIKYDLKGSTYKRRASQKEREKPLPTFKDLDFLQDIPDGLFLDADMYNALCKTLQRDCLVLQSFKIMDYSLLMSIHNIDHAQREPLSSETQYSVDTRRPAPQKALYSTAMESIQGEARRGGTMETDDHMGGIPARNSKGERLLLYIGIIDILQSYRFVKKLEHSWKALVHDGDTVSVHRPGFYAERFQRFMCNTVFKKIPLKPSPSKKFRSGSSFSRRAGSSGNSCITYQPSVSGEHKAQVTTKAEVEPGVHLGRPDVLPQTPPLEEISEGSPIPDPSFSPLVGETLQMLTTSTTLEKLEVAESEFTH

SEQ ID NO: 5215 - protein, 522 aa, Homo Sapiens
QEDTVFFHLPPRNGNGATVFGISCYRQIEAKALKVRQADITRETVQKSVCVLSKLPLYGLLQAKLQLITHAYFEEKDFSQISILKELYEHMNSSLGGASLEGSQVYLGLSPRDLVLHFRHKVLILFKLILLEKKVLFYISPVNKLVGALMTVLSLFPGMIEHGLSDCSQYRPRKSMSEDGGLQESNPCADDFVSASTADVSHTNLGTIRKVMAGNHGEDAAMKTEEPLFQVEDSSKGQEPNDTNQYLKPPSRPSPDSSESDWETLDPSVLEDPNLKEREQLGSDQTNLFPKDSVPSESLPITVQPQANTGQVVLIPGLISGLEEDQYGMPLAIFTKGYLCLPYMALQQHHLLSDVTVRGFVAGATNILFRQQKHLSDAIVEVEEALIQIHDPELRKLLNPTTADLRFADYLVRHVTENRDDVFLDGTGWEGGDEWIRAQFAVYIHALLAATLQLVLFRIVNVAKKIGNVMVTTSRNVVQTGKAVGQSVGGAFSSAKTAMSSWLSTFTTSTSQSLTEPPDEKP

SEQ ID NO: 5216 - protein, 509 aa, Homo Sapiens
MVDGVMILPVLIMIALPSPSMEDEKPKVNPKLYMCVCEGLSCGNEDHCEGQQCFSSLSINDGFHVYQKGCFQVYEQGKMTCKTPPSPGQAVECCQGDWCNRNITAQLPTKGKSFPGTQNFHLEVGLIILSVVFAVCLLACLLGVALRKFKRRNQERLNPRDVEYGTIEGLITTNVGDSTLADLLDHSCTSGSGSGLPFLVQRTVARQITLLECVGKGRYGEVWRGSWQGENVAVKIFSSRDEKSWFRETELYNTVMLRHENILGFIASDMTSRHSSTQLWLITHYHEMGSLYDYLQLTTLDTVSCLRIVLSIASGLAHLHIEIFGTQGKPAIAHRDLKSKNILVKKNGQCCIADLGLAVMHSQSTNQLDVGNNPRVGTKRYMAPEVLDETIQVDCFDSYKRVDIWAFGLVLWEVARRMVSNGIVEDYKPPFYDVVPNDPSFEDMRKVVCVDQQRPNIPNRWFSDPTLTSLAKLMKECWYQNPSARLTALRIKKTLTKIDNSLDKLKTDC

SEQ ID NO: 5217 - protein, 480 aa, Homo Sapiens
MNASEFRRRGKEMVDYVANYMEGIEGRQVYPDVEPGYLRPLIPAAAPQEPDTFEDIINDVEKIIMPGVTHWHSPYFFAYFPTASSYPAMLADMLCGAIGCIGFSWAASPACTELETVMMDWLGKMLELPKAFLNEKAGEGGGVIQGSASEATLVALLAARTKVIHRLQAASPELTQAAIMEKLVAYSSDQAHSSVERAGLIGGVKLKAIPSDGNFAMRASALQEALERDKAAGLIPFFMVATLGTTTCCSFDNLLEVGPICNKEDIWLHVDAAYAGSAFICPEFRHLLNGVEFADSFNFNPHKWLLVNFDCSAMWVKKRTDLTGAFRLDPTYLKHSHQDSGLITDYRHWQIPLGRRFRSLKMWFVFRMYGVKGLQAYIRKHVQLSHEFESLVRQDPRFEICVEVILGLVCFRLKGSNKVNEALLQRINSAKKIHLVPCHLRDKFVLRFAICSRTVESAHVQRAWEHIKELAADVLRAERE

SEQ ID NO: 5218 - protein, 401 aa, Homo Sapiens
MSSSGAKDKPELQFPFLQDEDTVATLLECKTLFILRGLPGSGKSTLARVIVDKYRDGTKMVSADAYKITPGARGAFSEEYKRLDEDLAAYCRRRDIRILVLDDTNHERERLEQLFEMADQYQYQVVLVEPKTAWRLDCAQLKEKNQWQLSADDLKKLKPGLEKDFLPLYFGWFLTKKSSETLRKAGQVFLEELGNHKAFKKELRQFVPGDEPREKMDLVTYFGKRPPGVLHCTTKFCDYGKAPGAEEYAQQDVLKKSYSKAFTLTISALFVTPKTTGARVELSEQQLQLWPSDVDKLSPTDNLPRGSRAHITLGCAADVEAVQTGLDLLEILRQEKGGSRGEEVGELSRGKLYSLGNGRWMLTLAKNMEVRAIFTGYYGKGKPVPTQGSRKGGALQSCTII

SEQ ID NO: 5219 - protein, 442 aa, Homo Sapiens
MSDSAGGRAGLRRYPKLPVWVVEDHQEVLPFIYRAIGSKHLPASNVSFLHFDSHPDLLIPVNMPADTVFDKETLFGELSIENWIMPAVYAGHFSHVIWFHPTWAQQIREGRHHFLVGKDTSTTTIRVTSTDHYFLSDGLYVPEDQLENQKPLQLDVIMVKPYKLCNNQEENDAVSSAKKPKLALEDSENTASTNCDSSPEGLEKDTATQRSDQTCLEPSCSCSSENQECQTAASTGEILEILKKGKAFVLDIDLDFFSVKNPFKEMFTQEEYKILQELYQFKKPGTNLTEEDLVDIVDTRIHQLEDLEATFADLCDGDDEETVQRWASNPGMESLVPLVQSLKKRMEVPDYEMVHQAGLTCDYSELPHHISTEQEIECLIQSVHYLLKNLPNPTLVTIARSSLDDYCPSDQVDTIQEKVLNMLRALYGNLDLQVYAAESPPS

SEQ ID NO: 5220 - protein, 1390 aa, Homo Sapiens
PGEKRPPGRADPRLPPAPPTFCTPSRGLQRPRSPGATMLDPSSSEEESDEIVEEESGKEVLGSAPSGARLSPSRTSEGSAGSAGLGGGGAGAGAGVGAGGGGGSGASSGGGAGGLQPSSRAGGGRPSSPSPSVVSEKEKEELERLQKEEEERKKRLQLYVFVMRCIAYPFNAKQPTDMARRQQKISKQQLQTVKDRFQAFLNGETQIMADEAFMNAVQSYYEVFLKSDRVARMVQSGGCSANDSREVFKKHIEKRVRSLPEIDGLSKETVLSSWMAKFDAIYRGEEDPRKQQARMTASAASELILSKEQLYEMFQNILGIKKFEHQLLYNACQLDNPDEQAAQIRRELDGRLQMADQIARERKFPKFVSKEMENMYIEELKSSVNLLMANLESMPVSKGGEFKLQKLKRSHNASIIDMGEESENQLSKSDVVLSFSLEVVIMEVQGLKSLAPNRIVYCTMEVEGGEKLQTDQAEASKPTWGTQGDFSTTHALPAVKVKLFTESTGVLALEDKELGRVILHPTPNSPKQSEWHKMTVSKNCPDQDLKIKLAVRMDKPQNMKHSGYLWAIGKNVWKRWKKRFFVLVQVSQYTFAMCSYREKKAEPQELLQLDGYTVDYTDPQPGLEGGRAFFNAVKEGDTVIFASDDEQDRILWVQAMYRATGQSHKPVPPTQVQKLNAKGGNVPQLDAPISQFYADRAQKHGMDEFISSNPCNFDHASLFEMVQRLTLDHRLNDSYSCLGWFSPGQVFVLDEYCARNGVRGCHRHLCYLRDLLERAENGAMIDPTLLHYSFAFCASHVHGNRPDGIGTVTVEEKERFEEIKERLRVLLENQITHFRYCFPFGRPEGALKATLSLLERVLMKDIVTPVPQEEVKTVIRKCLEQAALVNYSRLSEYAKIEENQKDAENVGRLITPAKKLEDTIRLAELVIEVLQQNEEHHAEPHVDKGEAFAWWSDLMVEHAETFLSLFAVDMDAALEVQPPDTWDSFPLFQLLNDFLRTDYNLCNGKFHKHLQDLFAPLVVRYVDLMESSIAQSIHRGFERESWEPVKSLTSNLPNVNLPNVNLPKVPNLPVNIPLGIPQMPTFSAPSWMAAIYDADNGSGTSEDLFWKLDALQTFIRDLHWPEEEFGKHLEQRLKLMASDMIESCVKRTRIAFEVKLQKTSRSTDFRVPQSICTMFNVMVDAKAQSTKLCSMEMGQEHQYHSKIDELIEETVKEMITLLVAKFVTILEGVLAKLSRYDEGTLFSSFLSFTVKAASKYVDVPKPGMDVADAYVTFVRHSQDVLRDKVNEEMYIERLFDQWYNSSMNVICTWLTDRMDLQLHIYQLKTLIRVVKKTYRDFRLQGVLDSTLNSKTYETIRNRLTVEEATASVSEGGGLQGISMKDSDEEDEEDD

SEQ ID NO: 5221 - protein, 637 aa, Homo Sapiens
MGLLSQGSPLSWEETKRHADHVRRHGILQFLHIYHAVKDRHKDVLKWGDEVEYMLVSFDHENKKVRLVLSGEKVLETLQEKGERTNPNHPTLWRPEYGSYMIEGTPGQPYGGTMSEFNTVEANMRKRRKEATSILEENQALCTITSFPRLGCPGFTLPEVKPNPVEGGASKSLFFPDEAINKHPRFSTLTRNIRHRRGEKVVINVPIFKDKNTPSPFIETFTEDDEASRASKPDHIYMDAMGFGMGNCCLQVTFQACSISEARYLYDQLATICPIVMALSAASPFYRGYVSDIDCRWGVISASVDDRTREERGLEPLKNNNYRISKSRYDSIDSYLSKCGEKYNDIDLTIDKEIYEQLLQEGIDHLLAQHVAHLFIRDPLTLFEEKIHLDDANESDHFENIQSTNWQTMRFKPPPPNSDIGWRVEFRPMEVQLTDFENSAYVVFVVLLTRVILSYKLDFLIPLSKVDENMKVAQKRDAVLQGMFYFRKDICKGGNAVVDGCGKAQNSTELAAEEYTLMSIDTIINGKEGVFPGLIPILNSYLENMEVDVDTRCSILNYLKLIKKRASGELMTVARWMREFIANHPDYKQDSVITDEMNYSLILKCNQIANELCECPELLGSAFRKVKYSGSKTDSSN

SEQ ID NO: 5222 - protein, 1184 aa, Homo Sapiens
MVGTKAWVFSFLVLEVTSVLGRQTMLTQSVRRVQPGKKNPSIFAKPADTLESPGEWTTLFNIDYPGGKGDYERLDAIRFYYGDRVCARPLRLEARTTDWTPAGSTGQVVHGSPREGFWCLNREQRPGQNCSNYTVRFLCPPGSLRRDTERIWSPWSPWSKCSAACGQTGVQTRTRICLAEMVSLCSEASEEGQHCMGQDCTACDLTCPMGQVNADCDACMCQDFMLHGAVSLPGGAPASGAAIYLLTKTPKLLTQTDSDGRFRIPGLCPDGKSILKITKVKFAPIVLTMPKTSLKAATIKAEFVRAETPYMVMNPETKARRAGQSVSLCCKATGKPRPDKYFWYHNDTLLDPSLYKHESKLVLRKLQQHQAGEYFCKAQSDAGAVKSKVAQLIVTASDETPCNPVPESYLIRLPHDCFQNATNSFYYDVGRCPVKTCAGQQDNGIRCRDAVQNCCGISKTEEREIQCSGYTLPTKVAKECSCQRCTETRSIVRGRVSAADNGEPMRFGHVYMGNSRVSMTGYKGTFTLHVPQDTERLVLTFVDRLQKFVNTTKVLPFNKKGSAVFHEIKMLRRKEPITLEAMETNIIPLGEVVGEDPMAELEIPSRSFYRQNGEPYIGKVKASVTFLDPRNISTATAAQTDLNFINDEGDTFPLRTYGMFSVDFRDEVTSEPLNAGKVKVHLDSTQVKMPEHISTVKLWSLNPDTGLWEEEGDFKFENQRRNKREDRTFLVGNLEIRERRLFNLDVPESRRCFVKVRAYRSERFLPSEQIQGVVISVINLEPRTGFLSNPRAWGRFDSVITGPNGACVPAFCDDQSPDAYSAYVLASLAGEELQAVESSPKFNPNAIGVPQPYLNKLNYRRTDHEDPRVKKTAFQISMAKPRPNSAEESNGPIYAFENLRACEEAPPSAAHFRFYQIEGDRYDYNTVPFNEDDPMSWTEDYLAWWPKPMEFRACYIKVKIVGPLEVNVRSRNMGGTHRRTVGKLYGIRDVRSTRDRDQPNVSAACLEFKCSGMLYDQDRVDRTLVKVIPQGSCRRASVNPMLHEYLVNHLPLAVNNDTSEYTMLAPLDPLGHNYGIYTVTDQDPRTAKEIALGRCFDGTSDGSSRIMKSNVGVALTFNCVERQVGRQSAFQYLQSTPAQSPAAGTVQGRVPSRRQQRASRGGQRQSGVVASLRFPRVAQQPLIN

SEQ ID NO: 5223 - protein, 586 aa, Homo Sapiens
MGVNAVHWFRKGLRLHDNPALKECIQGADTIRCVYILDPWFAGSSNVGINRWRFLLQCLEDLDANLRKLNSRLFVIRGQPADVFPRLFKEWNITKLSIEYDSEPFGKERDAAIKKLATEAGVEVIVRISHTLYDLDKIIELNGGQPPLTYKRFQTLISKMEPLEIPVETITSEVIEKCTTPLSDDHDEKYGVPSLEELGFDTDGLSSAVWPGGETEALTRLERHLERKAWVANFERPRMNANSLLASPTGLSPYLRFGCLSCRLFYFKLTDLYKKVKKNSSPPLSLYGQLLWREFFYTAATNNPRFDKMEGNPICVQIPWDKNPEALAKWAEGRTGFPWIDAIMTQLRQEGWIHHLARHAVACFLTRGDLWISWEEGMKVFEELLLDADWSINAGSWMWLSCSSFFQQFFHCYCPVGFGRRTDPNGDYIRRYLPVLRGFPAKYIYDPWNAPEGIQKVAKCLIGVNYPKPMVNHAEASRLNIERMKQIYQQLSRYRGLGLLASVPSNPNGNGGFMGYSAENIPGCSSSGSCSQGSGILHYAHGDSQQTHLLKQGRSSMGTGLSGGKRPSQEEDTQSIGPKVQRQSTN

SEQ ID NO: 5224 - protein, 622 aa, Homo Sapiens
MRLLRRRHMPLRLAMVGCAFVLFLFLLHRDVSSREEATEKPWLKSLVSRKDHVLDLMLEAMNNLRDSMPKLQIRAPEAQQTLFSINQSCLPGFYTPAELKPFWERPPQDPNAPGADGKAFQKSKWTPLETQEKEEGYKKHCFNAFASDRISLQRSLGPDTRPPECVDQKFRRCPPLATTSVIIVFHNEAWSTLLRTVYSVLHTTPAILLKEIILVDDASTEEHLKEKLEQYVKQLQVVRVVRQEERKGLITARLLGASVAQAEVLTFLDAHCECFHGWLEPLLARIAEDKTVVVSPDIVTIDLNTFEFAKPVQRGRVHSRGNFDWSLTFGWETLPPHEKQRRKDETYPIKSPTFAGGLFSIPKSYFEHIGTYDNQMEIWGGENVEMSFRVWQCGGQLEIIPCSVVGHVFRTKSPHTFPKGTSVIARNQVRLAEVWMDSYKKIFYRRNLQAAKMAQEKSFGDISERLQLREQLHCHNFSWYLHNVYPEMFVPDLTPTFYGAIKNLGTNQCLDVGENNRGGKPLIMYSCHGLGGNQYFEYTTQRDLRHNIAKQLCLHVSKGALGLGSCHFTGKNSQVPKDEEWELAQDQLIRNSGSGTCLTSQDKKPAMAPCNPSDPHQLWLFV

SEQ ID NO: 5225 - protein, 207 aa, Homo Sapiens
MNVARFLVEKHTLHVIIDFILSKVSNQQSNLAQHQRVYTGEKPYKCNEWGKALSGKSSLFYHQAIHGVGKLCKCNDCHKVFSNATTIANHWRIHNEDRSYKCNKCGKIFRHRSYLAVYQRTHTGEKPYKYHDCGKVFSQASSYAKHRRIHTGEKPHKCDDCGKVLTSRSHLIRHQRIHTGQKSYKCLKCGKVFSLWALHAEHQKIHF

SEQ ID NO: 5226 - protein, 2230 aa, Homo Sapiens
RDGHLQHRSGENSIRAAGWLVVRLATKWCQRKLQAELKIGSFRFFWIQNVSLKFQQHQQTVEIDNLWISSKLLSHDLPHYVALCFGEVRIRTDLQKVSDLSAPFSQSAGVDQKELSFSPSLLKIFCQLFSIHVDAINIMVLKVDTSESLWHIQISRSRFLLDSDGKRLICEVSLCKINSKVLKSGQLEDTCLVELSLALDLCLKVGISSRHLTAITVDVWTLHAELHEGLFQSQLLCQGPSLASKPVPCSEVTENLVEPTLPGLFLLQQLPDQVKVKMENTSVVLSMNSQKRHLTWTLKLLQFLYHRDEDQLPLRSFTANSDMAQMSTELLLEDGLLLSQSRQRIVCLNSLKASVQVTTIDLSASLVLNTCIIHYRHQEFSHWLHLLALETQGSSSPVLKQRKKRTFPQILAPIIFSTSISNVNISIQLGDTPPFALGFNSISLDYQHLRPQSIHQRGVLTVDHLCWRVGSDSHIQRAPHPPNMHVWGEALVLDSFTLQGSYNQPLGLSSTQSDTLFLDCTIRGLQVEASDTCAQCLSRILSLMGPQSGKSAVSRHSSFGESVSLLWKVDLKVEDMNLFTLSALVGASEVRLDTLTILGSAETSTVGIQGLVLALVKSVTEKMQPCCKAPDIPTPVLSLSMLSITYHSSIRSLEVQCGAGLTLLWSPPDHMYLYQHVLATLQCRDLLRATVFPETVPSLALETSGTTSELEGRAPEPLPPKRLLNLTLEVSTAKLTAFVAEDKFITLAAESVSLSRHGGSLQAYCPELAAGFDGNSIFNFKEVEVQLLPELEEMILHRNPFPALQTLRNRVWLLSFGSVSVEFPYQYDFSRTLDEAVGVQKWLKGLHQGTRAWASPSPVPLPPDLLLKVEHFSWVFLDDVFEVKLHDNYELMKDESKESAKRLQLLDAKVAALRKQHGELLPARKIEELYASLERKNIEIYIQRSRRLYGNTPMRRALLTWSLAGLELVALADASFHGPEHVVEQVQELDPGSPFPPEGLDLVIQWCRMLKCNVKSFLVRIRDYPRYLFEIRDWRLMGRLVGTEQSGQPCSRRRQILHLGLPWGNVAVERNMPPLKFYHDFHSEIFQYTVVWGPCWDPAWTLIGQCVDLLTKPSADPSPPLPWWDKSRLLFHGDWHMDIEQANLHQLATEDPYNTTENMHWEWSHLSFHWKPGQFVFKGDLDINVRTASKYDDCCFLHLPDLCMTLDLQWLCHGNPHDHHSVTLRAPEFLPEVPLGQLHDSYRAFRSENLNLSIKMDLTRHSGTISQPRILLYSSTLRWMQNFWATWTSVTRPICRGKLFNNLKPSKKKLGQHYKQLSYTALFPQLQVHYWASFAQQRGIQIECSQGHVFTRGTQRLIPQAGTVMRRLISDWSVTQMVSDLSQVTVHLMASPTEENADHCLDPLVTKTHLLSLSSLTYQRHSNRTAEEELSARDGDPTFHTHQLHLVDLRISWTTTNRDIAFGLYDGYKKAAVLKRNLSTEALKGLKIDPQMPAKKPKRGVPTSASAPPRVNTPSFSGQPDKGSSGGAYMLQKLIEETDRFVVFTEEESGMSDQLCGIAACQTDDIYNRNCLIELVNCQMVLRGAETEGCVIVSAAKAQLLQCQHHPAWYGDTLKQKTSWTCLLDGMQYFATTESSPTEQDGRQLWLEVKNIEEHRQRSLDSVQELMESGQAVGGMVTTTTDWNQPAEAQQAQQVQRIISRCNCRMYYISYSHDIDPELATQIKPPEVLENQEKEDLLKKQEGAVDTFTLIHHELEISTNPAQYAMILDIVNNLLLHVEPKRKEHSEKKQRVRFQLEISSNPEEQRSSILHLQEAVRQHVAQIRQLEKQMYSIMKSLQDDSKNENLLDLNQKLQLQLNQEKANLQLESEELNILIRCFKDFQLQRANKMELRKQQEDVSVVRRTEFYFAQARWRLTEEDGQLGIAELELQRFLYSKVNKSDDTAEHLLELGWFTMNNLLPNAVYKVVLRPQSSCQSGRQLALRLFSKVRPPVGGISVKEHFEVNVVPLTIQLTHQFFHRMMGFFFPGRSVEDDEVGDEEDKSKLVTTGIPVVKPRQLIATDDAVPLGPGKGVAQGLTRSSGVRRSFRKSPEHPVDDIDKMKERAAMNNSFIYIKIPQVPLCVSYKGEKNSVDWGDLNLVLPCLEYHNNTWTWLDFAMAVKRDSRKALVAQVIKEKLRLKSATGSEVRGKLETKSDLNMQQQEEEEKARLLIGLSVGDKNPGKKSIFGRRK

SEQ ID NO: 5227 - protein, 461 aa, Homo Sapiens [sequence omitted]

SEQ ID NO: 5228 - protein, 769 aa, Homo Sapiens
MEQDTAAVAATVAAADATATIVVIEDEQPGPSTSQEEGAAAAATEATAATEKGEKKKEKNVSSFQLKLAAKAPKSEKEMDPEYEEKMKADRAKRFEFLLKQTELFAHFIQPSAQKSPTSPLNMKLGRPRIKKDEKQSLISAGDYRHRRTEQEEDEELLSESRKTSNVCIRFEVSPSYVKGGPLRDYQIRGLNWLISLYENGVNGILADEMGLGKTLQTIALLGYLKHYRNIPGPHMVLVPKSTLHNWMNEFKRWVPSLRVICFVGDKDARAAFIRDEMMPGEWDVCVTSYEMVIKEKSVFKKFHWRYLVIDEAHRIKNEKSKLSEIVREFKSTNRLLLTGTPLQNNLHELWALLNFLLPDVFNSADDFDSWFDTKNCLGDQKLVERLHAVLKPFLLRRIKTDVEKSLPPKKEIKIYLGLSKMQREWYTKILMKDIDVLNSSGKMDKMRLLNILMQLRKCCNHPYLFDGAEPGPPYTTDEHIVSNSGKMVVLDKLLAKLKEQGSRVLIFSQMTRLLDILEDYCMWRGYEYCRLDGQTPHEEREDKFLEVEFLGQREAIEAFNAPNSSKFIFMLSTRAGGLGINLASADVVILYDSDWNPQVDLQAMDRAHRIGQKKPVRVFRLITDNTVEERIVERAEIKLRLDSIVIQQGRLIDQQSNKLAKEEMLQMIRHGATHVFASKESELTDEDITTILERGEKKTAEMNERLQKMGESSLRNFRMDIEQSLYKFEGEDYREKQKLGMVEWIEPPKRERKANYAVDAYFREALRV

SEQ ID NO: 5229 - protein, 280 aa, Homo Sapiens
MLSAVARGYQGWFHPCARLSVRMSSTGIDRKGVLANRVAVVTGSTSGIGFAIARRLARDGAHVVISSRKQQNVDRAMAKLQGEGLSVAGIVCHVGKAEDREQLVAKALEHCGGVDFLVCSAGVNPLVGSTLGTSEQIWDKILSVNVKSPALLLSQLLPYMENRRGAVILVSSIAAYNPVVALGVYNVSKTALLGLTRTLALELAPKDIRVNCVVPGIIKTDFSKVFHGNESLWKNFKEHHQLQRIGESEDCAGIVSFLCSPDASYVNGENIAVAGYSTRL

SEQ ID NO: 5230 - protein, 625 aa, Homo Sapiens
MNAAVVRRTQEALGKVIRRPPLTEKLLSKPPFRYLHDIITEVIRMTGFMKGLYTDAEMKSDNVKDKDAKISFLQKAIDVVVMVSGEPLLAKPARIVAGHEPERTNELLQIIGKCCLNKLSSDDAVRRVLAGEKGEVKGRASLTSRSQELDNKNVREEESRVHKNTEDRGDAEIKERSTSRDRKQKEELKEDRKPREKDKDKEKAKENGGNRHREGERERAKARARPDNERQKDRGNRERDRDSERKKETERKSEGGKEKERLRDRDRERDRDKGKDRDRRRVKNGEHSWDLDREKNREHDKPEKKSASSGEMSKKLSDGTFKDSKAETETEISTRASKSLTTKTSKRRSKNSVEGDSTSDAEGDAGPAGQDKSEVPETPEIPNELSSNIRRIPRPGSARPAPPRVKRQDSMEALQMDRSGSGKTVSNVITESHNSDNEEDDQFVVEAAPQLSEMSEIEMVTAVELEEEEKHGGLVKKILETKKDYEKLQQSPKPGEKERSLFESAWKKEKDIVSKEIEKLRTSIQTLCKSALPLGKIMDYIQEDVDAMQNELQMWHSENRQHAEALQQEQRITDCAVEPLKAELAELEQLIKDQQDKICAVKANILKNEEKIQKMVYSINLTSRR

SEQ ID NO: 5231 - protein, 1023 aa, Homo Sapiens
YKLLFNFVEQNMKIERLVEVKPSLVIDYLKTEKKLFWPKIKKVNVQVSFNPENKQKGILLTGSKTEVLKAVDIVKQVWDSVCVKSVHTDKPGAKQFFQDKARFYQSEIKRLFGCYIELQENEVMKEGGSPAGQKCFSRTVLAPGVVLIVQQGDLARLPVDVVVNASNEDLKHYGGLAAALSKAAGPELQADCDQIVKREGRLLPGNATISKAGKLPYHHVIHAVGPRWSGYEAPRCVYLLRRAVQLSLCLAEKYKYRSIAIPAISSGVFGFPLGRCVETIVSAIKENFQFKKDGHCLKEIYLVDVSEKTVEAFAEAVKTVFKATLPDTAAPPGLPPAAAGPGKTSWEKGSLVSPGGLQMLLVKEGVQNAKTDVVVNSVPLDLVLSRGPLSKSLLEKAGPELQEELDTVGQGVAVSMGTVLKTSSWNLDCRYVLHVVAPEWRNGSTSSLKIMEDIIRECMEITESLSLKSIAFPAIGTGNLGFPKNIFAELIISEVFKFSSKNQLKTLQEVHFLLHPSDHENIQAFSDEFARRANGNLVSDKIPKAKDTQGFYGTVSSPDSGVYEMKIGSIIFQVASGDITKEEADVIVNSTSNSFNLKAGVSKAILECAGQNVERECSQQAQQRKNDYIITGGGFLRCKNIIHVIGGNDVKSSVSSVLQECEKKNYSSICLPAIGTGNAKQHPDKVAEAIIDAIEDFVQKGSAQSVKKVKVVIFLPQVLDVFYANMKKREGTQLSSQQSVMSKLASFLGFSKQSPQKKNHLVLEKKTESATFRVCGENVTCVEYAISWLQDLIEKEQCPYTSEDECIKDFDEKEYQELNELQKKLNINISLDHKRPLIKVLGISRDVMQARDEIEAMIKRVRLAKEQESRADCISEFIEWQYNDNNTSHCFNKMTNLKLEDARREKKKTVDVKINHRHYTVNLNTYTATDTKGHSLSVQRLTKSKVDIPAHWSDMKQQNFCVVELLPSDPEYNTVASKFNQTCSHFRIEKVSLLLECSFWMVEISSVMVLYKIHFHSLPITFF

SEQ ID NO: 5232 - protein, 476 aa, Homo Sapiens
MASRIGLRMQLMREQAQQEEQRERMQQQAVMHYMQQQQQQQQQQLGGPPTPAINTPVHFQSPPPVPGEVLKVQSYLENPTSYHLQQSQHQKVREYLSETYGNKFAAHISPAQGSPKPPPAASPGVRAGHVLSSSAGNSAPNSPMAMLHIGSNPERELDDVIDNIMRLDDVLGYINPEMQMPNTLPLSSSHLNVYSSDPQVTASLVGVTSSSCPADLTQKRELTDAESRALAKERQKKDNHNLIERRRRFNINDRIKELGMLIPKANDLDVRWNKGTILKASVDYIRRMQKDLQKSRELENHSRRLEMTNKQLWLRIQELEMQARVHGLPTTSPSGMNMAELAQQVVKQELPSEEGPGEALMLGAEVPDPEPLPALPPQAPLPLPTQPPSPFHHLDFSHSLSFGGREDEGPPGYPEPLAPGHGSPFPSLSKKDLDLMLLDDSLLPLASDPLLSTMSPEASKASSRRSSFSMEEGDVL

SEQ ID NO: 5233 - protein, 2093 aa, Homo Sapiens
EFLSNPPAGFPSSRSDAERRQACDAILRACNQQLTAKLACPRHLGSLLELAELACDGYLVSTPQRPPLYLERILFVLLRNAAAQGSPEATLRLAQPLHACLVQCSREAAPQDYEAVARGSFSLLWKGAEALLERRAAFAARLKALSFLVLLEDESTPCEVPHFASPTACRAVAAHQLFDASGHGLNEADADFLDDLLSRHVIRALVGERGSSSGLLSPQRALCLLELTLEHCRRFCWSRHHDKAISAVEKAHSYLRNTNLAPSLQLCQLGVKLLQVGEEGPQAVAKLLIKASAVLSKSMEAPSPPLRALYESCQFFLSGLERGTKRRYRLDAILSLFAFLGGYCSLLQQLRDDGVYGGSSKQQQSFLQMYFQGLHLYTVVVYDFAQGCQIVDLADLTQLVDSCKSTVVWMLEALEGLSGQELTDHMGMTASYTSNLAYSFYSHKLYAEACAISEPLCQHLGLVKPGTYPEVPPEKLHRCFRLQVESLKKLGKQAQGCKMVILWLAALQPCSPEHMAEPVTFWVRVKMDAARAGDKELQLKTLRDSLSGWDPETLALLLREELQAYKAVRADTGQERFNIICDLLELSPEETPAGAWARATHLVELAQVLCYHDFTQQTNCSALDAIREALQLLDSVRPEAQARDQLLDDKAQALLWLYICTLEAKIQEGIERDRRAQAPGNLEEFEVNDLNYEDKLQEDRFLYSNIAFNLAADAAQSKCLDQALALWKELLTKGQAPAVRCLQQTAASLQILAALYQLVAKPMQALEVLLLLRIVSERLKDHSKAAGSSCHITQLLLTLGCPSYAQLHLEEAASSLKHLDQTTDTYLLLSLTCDLLRSQLYWTHQKVTKGVSLLLSVLRDPALQKSSKAWYLLRVQVLQLVAAYLSLPSNNLSHSLWEQLCAQGWQTPEIALIDSHKLLRSIILLLMGSDILSTQKAAVETSFLDYGENLVQKWQVLSEVLSCSEKLVCHLGRLGSVSEAKAFCLEALKLTTKLQIPRQCALFLVLKGELELARNDIDLCQSDLQQVLFLLESCTEFGGVTQHLDSVKKVHLQKGKQQAQVPCPPQLPEEELFLRGPALELVATVAKEPGPIAPSTNSSPVLKTKPQPIPNFLSHSPTCDCSLCASPVLTAVCLRWVLVTAGVRLAMGHQAQGLDLLQVVLKGCPEAAERLTQALQASLNHKTPPSLVPSLLDEILAQAYTLLALEGLNQPSNESLQKVLQSGLKFVAARIPHLEPWRASLLLIWALTKLGGLSCCTTQLFASSWGWQPPLIKSVPGSEPSKTQGQKRSGRGRQKLASAPLSLNNTSQKGLEGRGLPCTPKPPDRIRQAGPHVPFTVFEEVCPTESKPEVPQAPRVQQRVQTRLKVNFSDDSDLEDPVSAEAWLAEEPKRRGTASRGRGRARKGLSLKTDAVVAPGSAPGNPGLNGRSRRAKKVASRHCEERRPQRASDQARPGPEIMRTIPEEELTDNWRKMSFEILRGSDGEDSASGGKTPAPGPEAASGEWELLRLDSSKKKLPSPCPDKESDKDLGPRLQLPSAPVATGLSTLDSICDSLSVAFRGISHCPPSGLYAHLCRFLALCLGHRDPYATAFLVTESVSITCRHQLLTHLHRQLSKAQKHRGSLEIADQLQGLSLQEMPGDVPLARIQRLFSFRALESGHFPQPEKESFQERLALIPSGVTVCVLALATLQPGTVGNTLLLTRLEKDSPPVSVQIPTGQNKLHLRSVLNEFDAIQKAQKENSSCTDKREWWTGRLALDHRMEVLIASLEKSVLGCWKGLLLPSSEEPGPAQEASRLQELLQDCGWKYPDRTLLKIMLSGAGALTPQDIQALAYGLCPTQPERAQELLNEAVGRLQGLTVPSNSHLVLVLDKDLQKLPWESMPSLQALPVTRLPSFRFLLSYSIIKEYGASPVLSQGVDPRSTFYVLNPHNNLSSTEEQFRANFSSEAGWRGVVGEVPRPEQVQEALTKHDLYIYAGHGAGARFLDGQAVLRLSCRAVALLFGCSSAALAVHGNLEGAGIVLKYIMAGCPLFLGNLWDVTDRDIDRYTEALLQGWLGAGPGAPLLYYVNQARQAPRLKYLIGAAPIAYGLPVSLR

SEQ ID NO: 5234 - protein, 4655 aa, Homo Sapiens
MDRGPAAVACTLLLALVACLAPASGQECDSAHFRCGSGHCIPADWRCDGTKDCSDDADEIGCAVVTCQQGYFKCQSEGQCIPSSWVCDQDQDCDDGSDERQDCSQSTCSSHQITCSNGQCIPSEYRCDHVRDCPDGADENDCQYPTCEQLTCDNGACYNTSQKCDWKVDCRDSSDEINCTEICLHNEFSCGNGECIPRAYVCDHDNDCQDGSDEHACNYPTCGGYQFTCPSGRCIYQNWVCDGEDDCKDNGDEDGCESGPHDVHKCSPREWSCPESGRCISIYKVCDGILDCPGREDENNTSTGKYCSMTLCSALNCQYQCHETPYGGACFCPPGYIINHNDSRTCVEFDDCQIWGICDQKCESRPGRHLCHCEEGYILERGQYCKANDSFGEASIIFSNGRDLLIGDIHGRSFRILVESQNRGVAVGVAFHYHLQRVFWTDTVQNKVFSVDINGLNIQEVLNVSVETPENLAVDWVNNKIYLVETKVNRIDMVNLDGSYRVTLITENLGHPRGIAVDPTVGYLFFSDWESLSGEPKLERAFMDGSNRKDLVKTKLGWPAGVTLDMISKRVYWVDSRFDYIETVTYDGIQRKTVVHGGSLIPHPFGVSLFEGQVFFTDWTKMAVLKANKFTETNPQVYYQASLRPYGVTVYHSLRQPYATNPCKDNNGGCEQVCVLSHRTDNDGLGFRCKCTFGFQLDTDERHCIAVQNFLIFSSQVAIRGIPFTLSTQEDVMVPVSGNPSFFVGIDFDAQDSTIFFSDMSKHMIFKQKIDGTGREILAANRVENVESLAFDWISKNLYWTDSHYKSISVMRLADKTRRTVVQYLNNPRSVVVHPFAGYLFFTDWFRPAKIMRAWSDGSHLLPVINTTLGWPNGLAIDWAASRLYWVDAYFDKIEHSTFDGLDRRRLGHIEQMTHPFGLAIFGEHLFFTDWRLGAIIRVRKADGGEMTVIRSGIAYILHLKSYDVNIQTGSNACNQPTHPNGDCSHFCFPVPNFQRVCGCPYGMRLASNHLTCEGDPTNEPPTEQCGLFSFPCKNGRCVPNYYLCDGVDDCHDNSDEQLCGTLNNTCSSSAFTCGHGECIPAHWRCDKRNDCVDGSDEHNCPTHAPASCLDTQYTCDNHQCISKNWVCDTDNDCGDGSDEKNCNSTETCQPSQFNCPNHRCIDLSFVCDGDKDCVDGSDEVGCVLNCTASQFKCASGDKCIGVTNRCDGVFDCSDNSDEAGCPTRPPGMCHSDEFQCQEDGICIPNFWECDGHPDCLYGSDEHNACVPKTCPSSYFHCDNGNCIHRAWLCDRDNDCGDMSDEKDCPTQPFRCPSWQWQCLGHNICVNLSVVCDGIFDCPNGTDESPLCNGNSCSDFNGGCTHECVQEPFGAKCLCPLGFLLANDSKTCEDIDECDILGSCSQHCYNMRGSFRCSCDTGYMLESDGRTCKVTASESLLLLVASQNKIIADSVTSQVHNIYSLVENGSYIVAVDFDSISGRIFWSDATQGKTWSAFQNGTDRRVVFDSSIILTETIAIDWVGRNLYWTDYALETIEVSKIDGSHRTVLISKNLTNPRGLALDPRMNEHLLFWSDWGHHPRIERASMDGSMRTVIVQDKIFWPCGLTIDYPNRLLYFMDSYLDYMDFCDYNGHHRRQVIASDLIIRHPYALTLFEDSVYWTDRATRRVMRANKWHGGNQSVVMYNIQWPLGIVAVHPSKQPNSVNPCAFSRCSHLCLLSSQGPHFYSCVCPSGWSLSPDLLNCLRDDQPFLITVRQHIIFGISLNPEVKSNDAMVPIAGIQNGLDVEFDDAEQYIYWVENPGEIHRVKTDGTNRTVFASISMVGPSMNLALDWISRNLYSTNPRTQSIEVLTLHGDIRYRKTLIANDGTALGVGFPIGITVDPARGKLYWSDQGTDSGVPAKIASANMDGTSVKTLFTGNLEHLECVTLDIEEQKLYWAVTGRGVIERGNVDGTDRMILVHQLSHPWGIAVHDSFLYYTDEQYEVIERVDKATGANKIVLRDNVPNLRGLQVYHRRNAAESSNGCSNNMNACQQICLPVPGGLFSCACATGFKLNPDNRSCSPYNSFIVVSMLSAIRGFSLELSDHSETMVPVAGQGRNALHVDVDVSSGFIYWCDFSSSVASDNAIRRIKPDGSSLMNIVTHGIGENGVRGIAVDWVAGNLYFTNAFVSETLIEVLRINTTYRRVLLKVTVDMPRHIVVDPKNRYLFWADYGQRPKIERSFLDCTNRTVLVSEGIVTPRGLAVDRSDGYVYWVDDSLDIIARIRINGENSEVIRYGSRYPTPYGITVFENSIIWVDRNLKKIFQASKEPENTEPPTVIRDNINWLRDVTIFDKQVQPRSPAEVNNNPCLENNGGCSHLCFALPGLHTPKCDCAFGTLQSDGKNCAISTENFLIFALSNSLRSLHLDPENHSPPFQTINVERTVMSLDYDSVSDRIYFTQNLASGVGQISYATLSSGIHTPTVIASGIGTADGIAFDWITRRIYYSDYLNQMINSMAEDGSNRTVIARVPKPRAIVLDPCQGYLYWADWDTHAKIERATLGGNFRVPIVNSSLVMPSGLTLDYEEDLLYWVDASLQRIERSTLTGVDREVIVNAAVHAFGLTLYGQYIYWTDLYTQRIYRANKYDGSGQIAMTTNLLSQPRGINTVVKNQKQQCNNPCEQFNGGCSHICAPGPNGAECQCPHEGNWYLANNRKHCIVDNGERCGASSFTCSNGRCISEEWKCDNDNDCGDGSDEMESVCALHTCSPTAFTCANGRCVQYSYRCDYYNDCGDGSDEAGCLFRDCNATTEFMCNNRRCIPREFICNGVDNCHDNNTSDEKNCPDRTCQSGYTKCHNSNICIPRVYLCDGDNDCGDNSDENPTYCTTHTCSSSEFQCASGRCIPQHWYCDQETDCFDASDEPASCGHSERTCLADEFKCDGGRCIPSEWICDGDNDCGDMSDEDKRHQCQNQNCSDSEFLCVNDRPPDRRCIPQSWVCDGDVDCTDGYDENQNCTRRTCSENEFTCGYGLCIPKIFRCDRHNDCGDYSDERGCLYQTCQQNQFTCQNGRCISKTFVCDEDNDCGDGSDELMHLCHTPEPTCPPHEFKCDNGRCIEMMKLCNHLDDCLDNSDEKGCGINECHDPSISGCDHNCTDTLTSFYCSCRPGYKLMSDKRTCVDIDECTEMPFVCSQKCENVIGSYICKCAPGYLREPDGKTCRQNSNIEPYLIFSNRYYLRNLTIDGYFYSLILEGLDNVVALDFDRVEKRLYWIDTQRQVIERMFLNKTNKETIINHRLPAAESLAVDWVSRKLYWLDARLDGLFVSDLNGGHRRMLAQHCVDANNTFCFDNPRGLALHPQYGYLYWADWGHRAYIGRVGMDGTNKSVIISTKLEWPNGITIDYTNDLLYWADAHLGYIEYSDLEGHHRHTVYDGALPHPFAITIFEDTIYWTDWNTRTVEKGNKYDGSNRQTLVNTTHRPFDIHVYHPYRQPIVSNPCGTNNGGCSHLCLIKPGGKGFTCECPDDFRTLQLSGSTYCMPMCSSTQFLCANNEKCIPIWWKCDGQKDCSDGSDELALCPQRFCRLGQFQCSDGNCTSPQTLCNAHQNCPDGSDEDRLLCENHHCDSNEWQCANKRCIPESWQCDTFNDCEDNSDEDSSHCASRTCRPGQFRCANGRCIPQAWKCDVDNDCGDHSDEPIEECMSSAHLCDNFTEFSCKTNYRCIPKWAVCNGVDDCRDNSDEQGCEERTCHPVGDFRCKNHHCIPLRWQCDGQNDCGDNSDEENCAPRECTESEFRCVNQQCIPSRWICDHYNDCGDNSDERDCEMRTCHPEYFQCTSGHCVHSELKCDGSADCLDASDEADCPTRFPDGAYCQATMFECKNHVCIPPYWKCDGDDDCGDGSDEELHLCLDVPCNSPNRFRCDNNRCIYSHEVCNGVDDCGDGTDETEEHCRKPTPKPCTEYEYKCGNGHCIPHDNVCDDADDCGDWSDELGCNKGKERTCAENICEQNCTQLNEGGFICSCTAGFETNVFDRTSCLDINECEQFGTCPQHCRNTKGSYECVCADGFTSMSDRPGKRCAAEGSSPLLLLPDNVRIRKYNLSSERFSEYLQDEEYIQAVDYDWDPKDIGLSVVYYTVRGEGSRFGAIKRAYIPNFESGRNNLVQEVDLKLKYVMQPDGIAVDWVGRHIYWSDVKNKRIEVAKLDGRYRKWLISTDLDQPAAIAVNPKLGLMFWTDWGKEPKIESAWMNGEDRNILVFEDLGWPTGLSIDYLNNDRIYWSDFKEDVIETIKYDGTDRRVIAKEAMNPYSLDIFEDQLYWISKEKGEVWKQNKFGQGKKEKTLVVNPWLTQVRIFHQLRYNKSVPNLCKQICSHLCLLRPGGYSCACPQGSSFIEGSTTECDAAIELPINLPPPCRCMHGGNCYFDETDLPKCKCPSGYTGKYCEMAFSKGISPGTTAVAVLLTILLIVVIGALAIAGFFHYRRTGSLLPALPKLPSLSSLVKPSENGNGVTFRSGADLNMDIGVSGFGPETAIDRSMAMSEDFVMEMGKQPIIFENPMYSARDSAVKVVQPIQVTVSENVDNKNYGSPINPSEIVPETNPTSPAADGTQVTKWNLFKRKSKQTTNFENPIYAQMENEQKESVAATPPPSPSLPAKPKPPSRRDPTPTYSATEDTFKDTANLVKEDSEV

SEQ ID NO: 5235 - protein, 1200 aa, Homo Sapiens
GKIREGEKKRKKMQFETLRQVCNSVLSHFHGVFSSPPNILQNELFGQTLNNARKRSPSVSRDQNRRYDQREEREEYSQYATSDTAMPRSPSDYADRRSQHEPQFYEDSDHLSYRDSNRRSHRHSKEYIVDDEDVESRDEYERQRREEEYQSRYRSDPNLARYPVKPQPYEEQMRIHAEVSRARHERRHSDVSLANADLEDSRISMLRMDRPSRQRSISERRAAMENQRSYSMERTREAQGPSSYAQRTTNHSPPTPRRSPLPIDRPDLRRTDSLRKQHHLDPSSAVRKTKREKMETMLRNDSLSSDQSESVRPPPPKPHKSKKGGKMRQISLSSSEEELASTPEYTSCDDVEIESESVSEKGDSQKGKRKTSEQAVLSDSNTRSERQKEMMYFGGHSLEEDLEWSEPQIKDSGVDTCSSTTLNEEHSHSDKHPVTWQPSKDGDRLIGRILLNKRLKDGSVPRDSGAMLGLKVVGGKMTESGRLCAFITKVKKGSLADTVGHLRPGDEVLEWNGRLLQGATFEEVYNIILESKPEPQVELVVSRPIGDIPRIPDSTHAQLESSSSSFESQKMDRPSISVTSPMSPGMLRDVPQFLSGQLSIKLWFDKVGHQLIVTILGAKDLPSREDGRPRNPYVKIYFLPDRSDKNKRRTKTVKKTLEPKWNQTFIYSPVHRREFRERMLEITLWDQARVREEESEFLGEILIELETALLDDEPHWYKLQTHDVSSLPLPHPSPYMPRRQLHGESPTRRLQRSKRISDSEVSDYDCDDGIGVVSDYRHDGRDLQSSTLSVPEQVMSSNHCSPSGSPHRVDVIGRTRSWSPSVPPPQSRNVEQGLRGTRTMTGHYNTISRMDRHRVMDDHYSPDRDRDCEAADRQPYHRSRSTEQRPLLERTTTRSRSTERPDTNLMRSMPSLMTGRSAPPSPALSRSHPRTGSVQTSPSSTPVAGRRGRQLPQLPPKGTLDRKAGGKKLRSTVQRSTETGLAVEMRNWMTRQASRESTDGSMNSYSSEGNLIFPGVRLASDSQFSDFLDGLGPAQLVGRQTLATPAMGDIQVGMMDKKGQLEVEIIRARGLVVKPGSKTLPAPYVKVYLLDNGVCIAKKKTKVARKTLEPLYQQLLSFEESPQGKVLQIIVWGDYGRMDHKSFMGVAQILLDELELSNMVIGWFKLFPPSSLVDPTLAPLTRRASQSSLESSTGPSYSRS

SEQ ID NO: 5236 - protein, 815 aa, Homo Sapiens
MREPEELMPDSGAVFTFGKSKFAENNPGKFWFKNDVPVHLSCGDEHSAVVTGNNKLYMFGSNNWGQLGLGSKSAISKPTCVKALKPEKVKLAACGRNHTLVSTEGGNVYATGGNNEGQLGLGDTEERNTFHVISFFTSEHKIKQLSAGSNTSAALTEDGRLFMWGDNSEGQIGLKNVSNVCVPQQVTIGKPVSWISCGYYHSAFVTTDGELYVFGEPENGKLGLPNQLLGNHRTPQLVSEIPEKVIQVACGGEHTVVLTENAVYTFGLGQFGQLGLGTFLFETSEPKVIENIRDQTISYISCGENHTALITDIGLMYTFGDGRHGKLGLGLENFTNHFIPTLCSNFLRFIVKLVACGGCHMVVFAAPHRGVAKEIEFDEINDTCLSVATFLPYSSLTSGNVLQRTLSARMRRRERERSPDSFSMRRTLPPIEGTLGLSACFLPNSVFPRCSERNLQESVLSEQDLMQPEEPDYLLDEMTKEAEIDNSSTVESLGETTDILNMTHIMSLNSNEKSLKLSPVQKQKKQQTIGELTQDTALTENDDSDEYEEMSEMKEGKACKQHVSQGIFMTQPATTIEAFSDEEVEIPEEKEGAEDSKGNGIEEQEVEANEENVKVHGGRKEKTEILSDDLTDKAEDHEFSKTEELKLEDVDEEINAENVESKKKTVGDDESVPTGYHSKTEGAERTNDDSSAETIEKKEKANLEERAICEYNENPKGYMLDDADSSSLEILENSETTPSKDMKKTKKIFLFKRVPSINQKIVKNNNEPLPEIKSIGDQIILKSDNKDADQNHMSQNHQNIPPTNTERRSKSCTIL

SEQ ID NO: 5237 - protein, 445 aa, Homo Sapiens
MPSRAEDYEVLYTIGTGSYGRCQKIRRKSDGKILVWKELDYGSMTEAEKQMLVSEVNLLRELKHPNIVRYYDRIIDRTNTTLYIVMEYCEGGDLASVITKGTKERQYLDEEFVLRVMTQLTLALKECHRRSDGGHTVLHRDLKPANVFLDGKQNVKLGDFGLARILNHDTSFAKTFVGTPYYMSPEQMNRMSYNEKSDIWSLGCLLYELCALMPPFTAFSQKELAGKIREGKFRRIPYRYSDELNEIITRMLNLKDYHRPSVEEILENPLIADLVADEQRRNLERRGRQLGEPEKSQDSSPVLSELKLKEIQLQERERALKAREERLEQKEQELCVRERLAEDKLARAENLLKNYSLLKERKFLSLASNPELLNLPSSVIKKKVHFSGESKENIMRSENSESQLTSKSKCKDLKKRLHAAQLRAQALSDIEKNYQLKSRQILGMR

SEQ ID NO: 5238 - protein, 393 aa, Homo Sapiens [sequence omitted]

SEQ ID NO: 5239 - protein, 496 aa, Homo Sapiens
MTTFFTSVPPWIQDAKQEEEVGWKLVPRPRGREAESQVKCQCEISGTPFSNGEKLRPHSLPQPEQRPYSCPQLHCGKAFASKYKLYRHMATHSAQKPHQCMYCDKMFHRKDHLRNHLQTHDPNKEALHCSECGKNYNTKLGYRRHLAMHAASSGDLSCKVCLQTFESTQALLEHLKAHSRRVAGGAKEKKHPCDHCDRRFYTRKDVRRHLVVHTGRKDFLCQYCAQRFGRKDHLTRHVKKSHSQELLKIKTEPVDMLGLLSCSSTVSVKEELSPVLCMASRDVMGTKAFPGMLPMGMYGAHIPTMPSTGVPHSLVHNTLPMGMSYPLESSPISSPAQLPPKYQLGSTSYLPDKLPKVEVDSFLAELPGSLSLSSAEPQPASPQPAAAAALLDEALLAKSPANLSEALCAANVDFSHLLGFLPLNLPPCNPPGATGGLVMGYSQAEAQPLLTTLQAQPQDSPGAGGPLNFGPLHSLPPVFTSGLSSTTLPRFHQAFQ

SEQ ID NO: 5240 - protein, 424 aa, Homo Sapiens
SQQLWLGSPDEVWLYLVCEHTHIFTAIIWDSRTRFGSTDFSFHPSIAGVVVLLLLQGGSAYKLVCYFTNWSQDRQEPGKFTPENIDPFLCSHLIYSFASIENNKVIIKDKSEVMLYQTINSLKTKNPKLKILLSIGGYLFGSKGFHPMVDSSTSRLEFINSIILFLRNHNFDGLDVSWIYPDQKENTHFTVLIHELAEAFQKDFTKSTKERLLLTAGVSAGRQMIDNSYQVEKLAKDLDFINLLSFDFHGSWEKPLITGHNSPLSKGWQDRGPSSYYNVEYAVGYWIHKGMPSEKVVMGIPTYGHSFTLASAETTVGAPASGPGAAGPITESSGFLAYYEICQFLKGAKITRLQDQQVPYAVKGNQWVGYDDVKSMETKVQFLKNLNLGGAMIWSIDMDDFTGKSCNQGPYPLVQAVKRSLGSL

SEQ ID NO: 5241 - protein, 381 aa, Homo Sapiens
MGCLGGNSKTTEDQGVDEKERREANKKIEKQLQKERLAYKATHRLLLLGAGESGKSTIVKQMRILHVNGFNPEEKKQKILDIRKNVKDAIVTIVSAMSTIIPPVPLANPENQFRSDYIKSIAPITDFEYSQEFFDHVKKLWDDEGVKACFERSNEYQLIDCAQYFLERIDSVSLVDYTPTDQDLLRCRVLTSGIFETRFQVDKVNFHMFDVGGQRDERRKWIQCFNDVTAIIYVAACSSYNMVIREDNNTNRLRESLDLFESIWNNRWLRTISIILFLNKQDMLAEKVLAGKSKIEDYFPEYANYTVPEDATPDAGEDPKVTRAKFFIRDLFLRISTATGDGKHYCYPHFTCAVDTENIRRVFNDCRDIIQRMHLKQYELL

SEQ ID NO: 5242 - protein, 518 aa, Homo Sapiens [sequence omitted]

SEQ ID NO: 5243 - protein, 1452 aa, Homo Sapiens [sequence omitted]

SEQ ID NO: 5244 - protein, 273 aa, Homo Sapiens
  misc_feature (133)..(133): Xaa can be any naturally occurring amino acid
  misc_feature (266)..(266): Xaa can be any naturally occurring amino acid
MGILSVDLLITLQILPVFFSNCLFLALYDSVILLKHVVLLLSRSKSTRGEWRRMLTSEGLRCVWKSFLLDAYKQVKLGEDAPNSSVVHVSSTEGGDNSGNGTQEKIAEGATCHLLDFASPERPLVVNFGSATXPPFTSQLPAFRKLVEEFSSVADFLLVYIDEAHPSDGWAIPGDSSLSFEVKKHQNQEDRCAAAQQLLERFSLPPQCRVVADRMDNNANIAYGVAFERVCIVQRQKIAYLGGKGPFSYNLQEVRHWLEKNFSKRXKKTRLAG

SEQ ID NO: 5245 - protein, 941 aa, Homo Sapiens
MGQACGHSILCRSQQYPAARPAEPRGQQVFLKPDEPPPPPQPCADSLQDALLSLGSVIDISGLQRAVKEALSAVLPRVETVYTYLLDGESQLVCEDPPHELPQEGKVREAIISQKRLGCNGLGFSDLPGKPLARLVAPLAPDTQVLVMPLADKEAGAVAAVILVHCGQLSDNEEWSLQAVEKHTLVALRRVQVLQQRGPREAPRAVQNPPEGTAEDQKGGAAYTDRDRKILQLCGELYDLDASSLQLKVLQYLQQETRASRCCLLLVSEDNLQLSCKVIGDKVLGEEVSFPLTGCLGQVVEDKKSIQLKDLTSEDVQQLQSMLGCELQAMLCVPVISRATDQVVALACAFNKLEGDLFTDEDEHVIQHCFHYTSTVLTSTLAFQKEQKLKCECQALLQVAKNLFTHLDDVSVLLQEIITEARNLSNAEICSVFLLDQNELVAKVFDGGVVDDESYEIRIPADQGIAGHVATTGQILNIPDAYAHPLFYRGVDDSTGFRTRNILCFPIKNENQEVIGVAELVNKINGPWFSKFDEDLATAFSIYCGISIAHSLLYKKVNEAQYRSHLANEMMMYHMKVSDDEYTKLLHDGIQPVAAIDSNFASFTYTPRSLPEDDTSMAILSMLQDMNFINNYKIDCPTLARFCLMVKKGYRDPPYHNWMHAFSVSHFCYLLYKNLELTNYLEDIEIFALFISCMCHDLDHRGTNNSFQVASKSVLAALYSSEGSVMERHHFAQAIAILNTHGCNIFDHFSRKDYQRMLDLMRDIILATDLAHHLRIFKDLQKMAEVGYDRNNKQHHRLLLCLLMTSCDLSDQTKGWKTTRKIAELIYKEFFSQGDLEKAMGNRPMEMMDREKAYIPELQISFMEHIAMPIYKLLQDLFPKAAELYERVASNREHWTKVSHKFTIRGLPSNNSLDFLDEEYEVPDLDGTRAPINGCCSLDAE

SEQ ID NO: 5246 - protein, 923 aa, Homo Sapiens
IRHERVATSSASGRLPRNARRRGRALARSRRERPRCGAGQGSREAGPARACPCRAGTPSTMSSPASTPSRRGSRRGRATPAQTPRSEDARSSPSQRRRGEDSTSTGELQPMPTSPGVDLQSTAAQDVLFSSPPQMHSSAIPLDFDVSSPLTYGTPSSRVEGTPRSGVRGTPVRQRPDLGSAQKGLQVDLQSDGAAAEDIVASEQSLGQKLVIWGTDVNVAACKENFQRFLQRFIDPLAKEEENVGIDITEPLYMQRLGEINVIGEQFLNVNCEHIKSFDKNLYRQLISYPQEVIPTFDMAVNEIFFDRYPDSILEHQIQVRPFNALKTKNMRNLNPEDIDQLITISGMVIRTSQLIPEMQEAFFQCQVCAHTTRVEMDRGRIAEPSVCGRCHTTHSMALIHNRSLFSDKQMIKLQESPEDMPAGQTPHTVILFAHNDLVDKVQPGDRVNVTGIYRAVPIRVNPRVSNVKSVYKTHIDVIHYRKTDAKRLHGLDEEAEQKLFSEKRVELLKELSRKPDIYERLASALAPSIYEHEDIKKGILLQLFGGTRKDFSHTGRGKFRAEINILLCGDPGTSKSQLLQYVYNLVPRGQYTSGKGSSAVGLTAYVMKDPETRQLVLQTGALVLSDNGICCIDEFDKMNESTRSVLHEVMEQQTLSIAKAGIICQLNARTSVLAAANPIESQWNPKKTTIENIQLPHTLLSRFDLIFLMLDPQDEAYDRRLAHHLVALYYQSEEQAEEELLDMAVLKDYIAYAHSTIMPRLSEEASQALIEAYVDMRKIGSSRGMVSAYPRQLESLIRLAEAHAKVRLSNKVEAIDVEEAKRLHREALKQSATDPRTGIVDISILTTGMSATSRKRKEELAEALKKLILSKGKTPALKYQQLFEDIRGQSDIAITKDMFEEALRALADDDFLTVTGKTVRLL

SEQ ID NO: 5247 - protein, 1111 aa, Homo Sapiens
SSLLEKMTSSDKDFRFMATSDLMSELQKDSIQLDEDSERKVVKMLLRLLEDKNGEVQNLAVKWLGVPLGAFHASLLHCLLPQLSSPRLAVRKRAVGALGHLATACSTDLFVELADHLLDRLPGPRVPTSPTAIRTLIQCLGSVGRQAGHRLGAHLDRLVPLVEDFCNLDDDELRESCLQAFEAFLRKCPKEMGPHVPNVTSLCLQYIKHDPNYNYDSDEDEEQMETEDSEFSEQESEDEYSDDDDMSWKVRRAAAKCIAALISSRPDLLPDFHCTLAPVLIRRFKEREENVKADVFTAYIVLLRQTRPPKGWLEAMEEPTQTGSNLHMLRGQVPLVVKALQRQLKDRSVRARQGCFSLLTELAGVLPGSLAEHMPVLVSGIIFSLADRSSSSTIRMDALAFLQGLLGTEPAEAFHPHLPILLPPVMACVADSFYKIAAEALVVLQELVRALWPLHRPRMLDPEPYVGEMSAVTLARLRATDLDQEVKERAISCMGHLVGHLGDRLGDDLEPTLLLLLDRLRNEITRLPAIKALTLVAVSPLQLDLQPILAEALHILASFLRKNQRALRLATLAALDALAQSQGLSLPPSAVQAVLAELPALVNESDMHVAQLAVDFLATVTQAQPASLVEVSGPVLSELLRLLRSPLLPAGVLAAAEGFLQALVGTRPPCVDYAKLISLLTAPVYEQAVDGGPGLHKQVFHSLARCVAALSAACPQEAASTASRLVCDARSPHSSTGVKVLAFLSLAEVGQVAGPGPQRELKAVLLEALGSPSEDVRAAASYALGRVGAGSLPDFLPFLLEQIEAEPRRQYLLLHSLREALGAAQPDSLKPYAEDIWALLFQRCEGAEEGTRGVVAECIGKLVLVNPSFLLPRLRKQLAAGRPHTRSTVITAVKFLISDQPHPIDPLLKSFIAVHNKPSLVRDLLDDILPLLYQETKIRRDLIREVEMGPFKHTVDDGLDVRKAAFECMYSLLESCLGQLDICEFLNHVEDGLKDHYDIRMLTFIMVARLATLCPAPVLQRVDRLIEPLRATCTAKVKAGSVKQEFEKQDELKRSAMRAVAALLTIPEVGKSPIMADFSSQIRSNPELAALFESIQKDSASAPSTDSMELS

SEQ ID NO: 5248 - protein, 493 aa, Homo Sapiens
MALFGALFLALLAGAHAEFPGCKIRVTSKALELVKQEGLRFLEQELETITIPDLRGKEGHFYYNISEVKVTELQLTSSELDFQPQQELMLQITNASLGLRFRRQLLYWFFYDGGYINASAEGVSIRTGLELSRDPAGRMKVSNVSCQASVSRMHAAFGGTFKKVYDFLSTFITSGMRFLLNQQICPVLYHAGTVLLNSLLDTVPVRSSVDELVGIDYSLMKDPVASTSNLDMDFRGAFFPLTERNWSLPNRAVEPQLQEEERMVYVAFSEFFFDSAMESYFRAGALQLLLVGDKVPHDLDMLLRATYFGSIVLLSPAVIDSPLKLELRVLAPPRCTIKPSGTTISVTASVTIALVPPDQPEVQLSSMTMDARLSAKMALRGKALRTQLDLRRFRIYSNHSALESLALIPLQAPLKTMLQIGVMPMLNERTWRGVQIPLPEGINFVHEVVTNHAGFLTIGADLHFAKGLREVIEKNRPADVRASTAPTPSTAAV

SEQ ID NO: 5249 - protein, 2225 aa, Homo Sapiens
MAALVLEDGSVLRGQPFGAAVSTAGEVVFQTGMVGYPEALTDPSYKAQILVLTYPLIGNYGIPPDEMDEFGLCKWFESSGIHVAALVVGECCPTPSHWSATRTLHEWLQQHGIPGLQGVDTRELTKKLREQGSLLGKLVQNGTEPSSLPFLDPNARPLVPEVSIKTPRVFNTGGAPRILALDCGLKYNQIRCLCQRGAEVTVVPWDHALDSQEYEGLFLSNGPGDPASYPSVVSTLSRVLSEPNPRPVFGICLGHQLLALAIGAKTYKMRYGNRGHNQPCLLVGSGRCFLTSQNHGFAVETDSLPADWAPLFTNANDGSNEGIVHNSLPFFSVQFHPEHQAGPSDMELLFDIFLETVKEATAGNPGGQTVRERLTERLCPPGIPTPGSGLPPPRKVLILGSGGLSIGQAGEFDYSGSQAIKALKEENIQTLLINPNIATVQTSQGLADKVYFLPITPHYVTQVIRNERPDGVLLTFGGQTALNCGVELTKAGVLARYGVRVLGTPVETIELTEDRRAFAARMAEIGEHVAPSEAANSLEQAQAAAERLGYPVLVRAAFALGGLGSGFASNREELSALVAPAFAHTSQVLVDKSLKGWKEIEYEVVRDAYGNCVTVCNMENLDPLGIHTGESIVVAPSQTLNDREYQLLRQTAIKVTQHLGIVGECNVQYALNPESEQYYIIEVNARLSRSSALASKATGYPLAYVAAKLALGIPLPELRNSVTGGTAAFEPSVDYCVVKIPRWDLSKFLRVSTKIGSCMKSVGEVMGIGRSFEEAFQKALRMVDENCVGFDHTVKPVSDMELETPTDKRIFVVAAALWAGYSVDRLYELTRIDRWFLHRMKRIIAHAQLLEQHRGQPLPPDLLQQAKCLGFSDKQIALAVLSTELAVRKLRQELGICPAVKQIDTVAAEWPAQTNYLYLTYWGTTHDLTFRTPHVLVLGSGVYRIGSSVEFDWCAVGCIQQLRKMGYKTIMVNYNPETVSTDYDMCDRLYFDEISFEVVMDIYELENPEGVILSMGGQLPNNMAMALHRQQCRVLGTSPEAIDSAENRFKFSRLLDTIGISQPQWRELSDLESARQFCQTVGYPCVVRPSYVLSGAAMNVAYTDGDLERFLSSAAAVSKEHPVVISKFIQEAKEIDVDAVASDGVVAAIAISEHVENAGVHSGDATLVTPPQDITAKTLERIKAIVHAVGQELQVTGPFNLQLIAKDDQLKVIECNVRVSRSFPFVSKTLGVDLVALATRVIMGEEVEPVGLMTGSGVVGVKVPQFSFSRLAGADVVLGVEMTSTGEVAGFGESRCEAYLKAMLSTGFKIPKKNILLTIGSYKNKSELLPTVRLLESLGYSLYASLGTADFYTEHGVKVTAVDWHFEEAVDGECPPQRSILEQLAEKNFELVINLSMRGAGGRRLSSFVTKGYRTRRLAADFSVPLIIDIKCTKLFVEALGQIGPAPPLKVHVDCMTSQKLVRLPGLIDVHVHLREPGGTHKEDFASGTAAALAGGITMVCAMPNTRPPIIDAPALALAQKLAEAGARCDFALFLGASSENAGTLGTVAGSAAGLKLYLNETFSELRLDSVVQWMEHFETWPSHLPIVAHAEQQTVAAVLMVAQLTQRSVHICHVARKEEILLIKAAKARGLPVTCEVAPHHLFLSHDDLERLGPGKGEVRPELGSRQDVEALWENMAVIDCFASDHAPHTLEEKCGSRPPPGFPGLETMLPLLLTAVSEGRLSLDDLLQRLHHNPRRIFHLPPQEDTYVEVDLEHEWTIPSHMPFSKAHWTPFEGQKVKGTVRRVVLRGEVAYIDGQVLVPPGYGQDVRKWPQGAVPQLPPSAPATSEMTTTPERPRRGIPGLPDGRFHLPPRIHRASDPGLPAEEPKEKSSRKVAEPELMGTPDGTCYPPPPVPRQASPQNLGTPGLLHPQTSPLLHSLVGQHILSVQQFTKDQMSHLFNVAHTLRMMVQKERSLDILKGKVMASMFYEVSTRTSSSFAAAMARLGGAVLSFSEATSSVQKGESLADSVQTMSCYADVVVLRHPQPGAVELAAKHCRRPVINAGDGVGEHPTQALLDIFTIREELGTVNGMTITMVGDLKHGRTVHSLACLLTQYRVSLRYVAPPSLRMPPTVRAFVASRGTKQEEFESIEEALPDTDVLYMTRIQKERFGSTQEYEACFGQFILTPHIMTRAKKKMVVMHPMPRVNEISVEVDSDPRAAYFRQAENGMYIRMALLATVLGRF

SEQ ID NO: 5250 - protein, 1158 aa, Homo Sapiens
MTHGEELGSDVHQDSIVLTYLEGLLMHQAAGGSGTAVDKKSAGHNEEDQNFNISGSAFPTCQSNGPVLNTHTYQGSGMLHLKKARLLQSSEDWNAAKRKRLSDSIMNLNVKKEALLAGMVDSVPKGKQDSTLLASLLQSFSSRLQTVALSQQIRQSLKEQGYALSHDSLKVEKDLRCYGVASSHLKTLLKKSKVKDQKPDTNLPDVTKNLIRDRFAESPHHVGQSGTKVMSEPLSCAARLQAVASMVEKRASPATSPKPSVACSQLALLLSSEAHLQQYSREHALKTQNANQAASERLAAMARLQENGQKDVGSYQLPKGMSSHLNGQARTSSSKLMASKSSATVFQNPMGIIPSSPKNAGYKNSLERNNIKQAANNSLLLHLLKSQTIPKPMNGHSHSERGSIFEESSTPTTIDEYSDNNPSFTDDSSGDESSYSNCVPIDLSCKHRTEKSESDQPVSLDNFTQSLLNTWDPKVPDVDIKEDQDTSKNSKLNSHQKVTLLQLLLGHKNEENVEKNTSPQGVHNDVSKFNTQNYARTSVIESPSTNRTTPVSTPPLLTSSKAGSPINLSQHSLVIKWNSPPYVCSTQSEKLTNTASNHSMDLTKSKDPPGEKPAQNEGAQNSATFSASKLLQNLAQCGMQSSMSVEEQRPSKQLLTGNTDKPIGMIDRLNSPLLSNKTNAVEENKAFSSQPTGPEPGLSGSEIENLLERRTVLQLLLGNPNKGKSEKKEKTPLRDESTQEHSERALSEQILMVKIKSEPCDDLQIPNTNVHLSHDAKSAPFLGMAPAVQRSAPALPVSEDFKSEPVSPQDFSFSKNGLLSRLLRQNQDSYLADDSDRSHRNNEMALLESKNLCMVPKKRKLYTEPLENPFKKMKNNIVDAANNHSAPEVLYGSLLNQEELKFSRNDLEFKYPAGHGSASESEHRSWARESKSFNVLKQLLLSENCVRDLSPHRSNSVADSKKKGHKNNVTNSKPEFSISSLNGLMYSSTQPSSCMDNRTFSYPGVVKTPVSPTFPEHLGCAGSRPESGLLNGCSMPSEKGPIKWVITDAEKNEYEKDSPRLTKTNPILYYMLQKGGNSVTSRETQDKDIWREASSAESVSQVTAKEELLPTAETKASFFNLRSPYNSHMGNNASRPHSANGEVYGLLGSVLTIKKESE

SEQ ID NO: 5251 - protein, 385 aa, Homo Sapiens
MVVVLVCLQLLEAAVVKVPLKKFKSIRETMKEKGLLGEFLRTHKYDPAWKYRFGDLSVTYEPMAYMDAAYFGEISIGTPPQNFLVLFDTGSSNLWVPSVYCQSQACTSHSRFNPSESSTYSTNGQTFSLQYGSGSLTGFFGYDTLTVQSIQVPNQEFGLSENEPGTNFVYAQFDGIMGLAYPALSVDEATTAMQGMVQEGALTSPVFSVYLSNQQGSSGGAVVFGGVDSSLYTGQIYWAPVTQELYWQIGIEEFLIGGQASGWCSEGCQAIVDTGTSLLTVPQQYMSALLQATGAQEDEYGQFLVNCNSIQNLPSLTFIINGVEFPLPPSSYILSNNGYCTVGVEPTYLSSQNGQPLWILGDVFLRSYYSVYDLGNNRVGFATAA

SEQ ID NO: 5252 - protein, 1094 aa, Homo Sapiens [sequence omitted]

SEQ ID NO: 5253 - protein, 488 aa, Homo Sapiens
MAPAAWLRSAAARALLPPMLLLLLQPPPLLARALPPDVHHLHAERRGPQPWHAALPSSPAPAPATQEAPRPASSLRPPRCGVPDPSDGLSARNRQKRFVLSGGRWEKTDLTYRILRFPWQLVQEQVRQTMAEALKVWSDVTPLTFTEVHEGRADIMIDFARYWHGDDLPFDGPGGILAHAFFPKTHREGDVHFDYDETWTIGDDQGTDLLQVAAHEFGHVLGLQHTTAAKALMSAFYTFRYPLSLSPDDCRGVQHLYGQPWPTVTSRTPALGPQAGIDTNEIAPLEPDAPPDACEASFDAVSTIRGELFFFKAGFVWRLRGGQLQPGYPALASRHWQGLPSPVDAAFEDAQGHIWFFQGAQYWVYDGEKPVLGPAPLTELGLVRFPVHAALVWGPEKNKIYFFRGRDYWRFHPSTRRVDSPVPRRATDWRGVPSEIDAAFQDADGYAYFLRGRLYWKFDPVKVKALEGFPRLVGPDFFGCAEPANTFL

SEQ ID NO: 5254 - protein, 74 aa, Homo Sapiens
MPPQLQNGLNLSAKVVQGSLDSLPQAVREFLENNAELCQPDHIHICDGSEEENGRLLGQMEEEGILRRLKKYDN

SEQ ID NO: 5255 - protein, 712 aa, Homo Sapiens
MSSPASTPSRRGSRRGRATPAQTPRSEDARSSPSQRRRGEDSTSTGELQPMPTSPGVDLQSPAAQDVLFSSPPQMHSSAIPLDFDVSSPLTYGTPSSRVEGTPRSGVRGTPVRQRPDLGSAQKGLQVDLQSDGAAAEDIVASEQSLGQKLVIWGTDVNVAACKENFQRFLQRFIDPLAKEEENVGIDITEPLYMQRLGEINVIGEPFLNVNCEHIKSFDKNLYRQLISYPQEVIPTFDMAVNEIFFDRYPDSILEHQIQVRPFNALKTKNMRNLNPEDIDQLITISGMVIRTSQLIPEMQEAFFQCQVCAHTTRVEMDRGRIAEPSVCGRCHTTHSMALIHNRSLFSDKQMIKLQESPEDMPAGQTPHTVILFAHNDLVDKVQPGDRVNVTGIYRAVPIRVNPRVSNVKSVYKTHIDVIHYRKTDAKRLHGLDEEAEQKLFSEKRVELLKELSRKPDIYERLASALAPSIYEHEDIKKGILLQLFGGTRKDFSHTGRGKFRAEINILLCGDPGTSKSQLLQYVYNLVPRGQYTSGKGSSAVGLTAYVMKDPETRQLVLQTGALVLSDNGICCIDEFDKMNESTRSVLHEVMEQQTLSIAKAGIICQLNARTSVLAAANPIESQWNPKKTTIENIQLPHTLLSRFDLIFLLLDPQDEAYDRRLAHHLVALYYQSEEQAEEELLDMAVLKDYIAYAHSTIMPRLSEEASQALIE

SEQ ID NO: 5256 - protein, 267 aa, Homo Sapiens
MPRSCCSRSGALLLALLLQASMEVRGWCLESSQCQDLTTESNLLECIRACKPDLSAETPMFPGNGDEQPLTENPRKYVMGHFRWDRFGRRNSSSSGSSGAGQKREDVSAGEDCGPLPEGGPEPRSDGAKPGPREGKRSYSMEHFRWGKPVGKKRRPVKVYPNGAEDESAEAFPLEFKRELTGQRLREGDGPDGPADDGAGAQADLEHSLLVAAEKKDEGPYRMEHFRWGSPPKDKRYGGFMTSEKSQTPLVTLFKNAIIKNAYKKGE

SEQ ID NO: 5257 - protein, 482 aa, Homo Sapiens [sequence omitted]

SEQ ID NO: 5258 - protein, 781 aa, Homo Sapiens
KMAEESSSSSSSSSPTAATSQQQQLKNKSILISSVASVHHANGLAKSSTTVSSFANSKPGSAKKLVIKNFKDKPKLPENYTDETWQKLKEAVEAIQNSTSIKYNLEELYQAVENLCSYKISANLYKQLRQICEDHIKAQIHQFREDSLDSVLFLKKIDRCWQNHCRQMIMIRSIFLFLDRTYVLQNSMLPSIWDMGLELFRAHIISDQKVQNKTIDGILLLIERERNGEAIDRSLLRSLLSMLSDLQIYQDSFEQRFLEETNRLYAAEGQKLMQEREVPEYLHHVNKRLEEEADRLITYLDQTTQKSLIATVEKQLLGEHLTAILQKGLNNLLDENRIQDLSLLYQLFSRVRGGVQVLLQQWIEYIKAFGSTIVINPEKDKTMVQELLDFKDKVDHIIDICFLKNEKFINAMKEAFETFINKRPNKPAELIAKYVDSKLRAGNKEATDEELEKMLDKIMIIFRFIYGKDVFEAFYKKDLAKRLLVGKSASVDAEKSMLSKLKHECGAAFTSKLEGMFKDMELSKDIMIQFKQYMQNQNVPGNIELTVNILTMGYWPTYVPMEVHLPPEMVKLQEIFKTFYLGKHSGRKLQWQSTLGHCVLKAEFKEGKKELQVSLFQTLVLLMFNEGEEFSLEEIKQATGIEDGELRRTLQSLACGKARVLAKNPKGKDIEDGDKFICNDDFKHKLFRIKINQIQMKETVEEQASTTERVFQDRQYQIDAAIVRIMKMRKTLSHNLLVSEVYNQLKFPVKPADLKKRIESLIDRDYMERDKENPNQYNYIA

SEQ ID NO: 5259 - protein, 622 aa, Homo Sapiens
MALPTARPLLGSCGTPALGSLLFLLFSLGWVQPSRTLAGETGQEAAPLDGVLANPPNISSLSPRQLLGFPCAEVSGLSTERVRELAVALAQKNVKLSTEQLRCLAHRLSEPPEDLDALPLDLLLFLNPDAFSGPQACTRFFSRITKANVDLLPRGAPERQRLLPAALACWGVRGSLLSEADVRALGGLACDLPGRFVAESAEVLLPRLVSCPGPLDQDQQEAARAALQGGGPPYGPPSTWSVSTMDALRGLLPVLGQPIIRSIPQGIVAAWRQRSSRDPSWRQPERTILRPRFRREVEKTACPSGKKAREIDESLIFYKKWELEACVDAALLATQMDRVNAIPFTYEQLDVLKHKLDELYPQGYPESVIQHLGYLFLKMSPEDIRKWNVTSLETLKALLEVNKGHEMSPQVATLIDRFVKGRGQLDKDTLDTLTAFYPGYLCSLSPEELSSVPPSSIWAVRPQDLDTCDPRQLDVLYPKARLAFQNMNGSEYFVKIQSFLGGAPTEDLKALSQQNVSMDLATFMKLRTDAVLPLTVAEVQKLLGPHVEGLKAEERHRPVRDWILRQRQDDLDTLGLGLQGGIPNGYLVLDLSVQEALSGTPCLLGPGPVLTVLALLLASTLA

SEQ ID NO: 5260 - protein, 573 aa, Homo Sapiens
AAAPGSNPTPTRRPPALSPTSPRPMVRGWEPPPGLDCAISEGHKSEGTMPPNKEASGLSSSPAGLICLPPISEELQLVWTQAAQTSELDSNEHLLKTFSYFPYPSLADIALLCLRYGLQMEKVKTWFMAQRLRCGISWSSEEIEETRARVVYRRDQLHFKSLLSFTHHAGRPPEEVPPPPVPAPEQVGIGIGPPTLSKPTQTKGLKVEPEEPSQMPPLPQSHQKLKESLMTPGSGAFPYQSDFWQHLQSSGLSKEQAGRGPNQSHGIGTASWNHSTTVPQPQARDKPPPIALIASSCKEESASSVTPSSSSTSSSFQVLANGATAASKPLQPLGCVPQSVSPSEQALPPHLEPAWPQGLRHNSVPGRVGPTEYLSPDMQRQRKTKRKTKEQLAILKSFFLQCQWARREDYQKLEQITGLPRPEIIQWFGDTRYALKHGQLKWFRDNAVPGAPSFQDPAIPTPPPSTRSLNERAETPPLPIPPPPPDIQPLERYWAAHQQLRETDIPQLSQASRLSTQQVLDWFDSRLPQPAEVVVCLDEEEEEEEEELPEDDEEEEEEEEDDDDDDDDVIIQD

SEQ ID NO: 5261 - protein, 1531 aa, Homo Sapiens [sequence omitted]

SEQ ID NO: 5262 - protein, 255 aa, Homo Sapiens
MSMEDPFFVVKGEVQKAVNTAQGLFQRWTELLQDPSTATREEIDWTTNELRNNLRSIEWDLEDLDETISIVEANPRKFNLDATELSIRKAFITSTRQVVRDMKDQMSTSSVQALAERKNRQALLGDSGSQNWSTGTTDKYGRLDRELQRANSHFIEEQQAQQQLIVEQQDEQLELVSGSIGVLKNMSQRIGGELEEQAVMLEDFSHELESTQSRLDNVMKKLAKVSHMTSDRRQWCAIAILFAVLLVVLILFLVL

SEQ ID NO: 5263 - protein, 691 aa, Homo Sapiens
MIRGRNSATSADEQPHIGNYRLLKTIGKGNFAKVKLARHILTGKEVAVKIIDKTQLNSSSLQKLFREVRIMKVLNHPNIVKLFEVIETEKTLYLVMEYASGGEVFDYLVAHGRMKEKEARAKFRQIVSAVQYCHQKFIVHRDLKAENLLLDADMNIKIADFGFSNEFTFGNKLDTFCGSPPYAAPELFQGKKYDGPEVDVWSLGVILYTLVSGSLPFDGQNLKELRERVLRGKYRIPFYMSTDCENLLKKFLILNPSKRGTLEQIMKDRWMNVGHEDDELKPYVEPLPDYKDPRRTELMVSMGYTREEIQDSLVGQRYNEVMATYLLLGYKSSELEGDTITLKPRPSADLTNSSAQFPSHKVQRSVSANPKQRRFSDQAGPAIPTSNSYSKKTQSNNAENKRPEEDRESGRKASSTAKVPASPLPGLERKKTTPTPSTNSVLSTSTNRSRNSPLLERASLGQASIQNGKDSTAPQRVPVASPSAHNISSSGGAPDRTNFPRGVSSRSTFHAGQLRQVRDQQNLPYGVTPASPSGHSQGRRGASGSIFSKFTSKFVRRNLNEPESKDRVETLRPHVVGSGGNDKEKEEFREAKPRSLRFTWSMKTTSSMEPNEMMREIRKVLDANSCQSELHEKYMLLCMHGTPGHEDFVQWEMEVCKLPRLSLNGVRFKRISGTSMAFKNIASKIANELKL

SEQ ID NO: 5264 - protein, 404 aa, Homo Sapiens [sequence omitted]

SEQ ID NO: 5265 - protein, 888 aa, Homo Sapiens
MAGAAAESGRELWTFAGSRDPSAPRLAYGYGPGSLRELRAREFSRLAGTVYLDHAGATLFSQSQLESFTSDLMENTYGNPHSQNISSKLTHDTVEQVRYRILAHFHTTAEDYTVIFTAGSTAALKLVAEAFPWVSQGPESSGSRFCYLTDSHTSVVGMRNVTMAINVISIPVRPEDLWSAEERGASASNPDCQLPHLFCYPAQSNFSGVRYPLSWIEEVKSGRLRPVSTPGKWFVLLDAASYVSTSPLDLSAHQADFVPISFYKIFGFPTGLGALLVHNRAAPLLRKTYFGGGTASAYLAGEDFYIPRQSVAQRFEDGTISFLDVIALKHGFDTLERLTGGMENIKQHTFTLAQYTYMALSSLQYPNGAPVVRIYSDSEFSSPEVQGPIINFNVLDDKGNIIGYSQVDKMASLYNIHLRTGCFCNTGACQRHLGISNEMVRKHFQAGHVCGDNMDLIDGQPTGSVRISFGYMSTLDDVQAFLRFIIDTRLHSSGDWPVPQAHADTGETGAPSADSQADVIPAVMGRRSLSPQEDALTGSRVWNNSSTVNAVPVAPPVCDVARTQPTPSEKAAGVLEGALGPHVVTNLYLYPIKSCAAFEVTRWPVGNQGLLYDRSWMVVNHNGVCLSQKQEPRLCLIQPFIDLRQRIMVIKAKGMEPIEVPLEENSERTQIRQSRVCADRVSTYDCGEKISSWLSTFFGRPCNLIKQSSNSQRNAKKKHGKDQLPGTMATLSLVNEAQYLLINTSSILELHRQLNTSDENGKEELFSLKDLSLRFRANIIINGKRAFEEEKWDEISIGSLRFQVLGPCHRCQMICIDQQTGQRNQHVFQKLSESRETKVNFGMYLMHASLDLSSPCFLSVGSQVLPVLKENVEGHDLPASEKHQDVTS

SEQ ID NO: 5266 - protein, 587 aa, Homo Sapiens
MSHTVAGGGSGDHSHQVRVKAYYRGDIMITHFEPSISFEGLCNEVRDMCSFDNEQLFTMKWIDEEGDPCTVSSQLELEEAFRLYELNKDSELLIHVFPCVPERPGMPCPGEDKSIYRRGARRWRKLYCANGHTFQAKRFNRRAHCAICTDRIWGLGRQGYKCINCKLLVHKKCHKLVTIECGRHSLPQEPVMPMDQSSMHSDHAQTVIPYNPSSHESLDQVGEEKEAMNTRESGKASSSLGLQDFDLLRVIGRGSYAKVLLVRLKKTDRIYAMKVVKKELVNDDEDIDWVQTEKHVFEQASNHPFLVGLHSCFQTESRLFFVIEYVNGGDLMFHMQRQRKLPEEHARFYSAEISLALNYLHERGIIYRDLKLDNVLLDSEGHIKLTDYGMCKEGLRPGDTTSTFCGTPNYIAPEILRGEDYGFSVDWWALGVLMFEMMAGRSPFDIVGSSDNPDQNTEDYLFQVILEKQIRIPRSLSVKAASVLKSFLNKDPKERLGCHPQTGFADIQGHPFFRNVDWDMMEQKQVVPPFKPNISGEFGLDNFDSQFTNEPVQLTPDDDDIVRKIDQSEFEGFEYINPLLMSAEECV

SEQ ID NO: 5267 - protein, 352 aa, Homo Sapiens
MDIDKDLEAPLYLTPEGWSLFLQRYYQVVHEGAELRHLDTQVQRCEDILQQLQAVVPQIDMEGDRNIWIVKPGAKSRGRGIMCMDHLEEMLKLVNGNPVVMKDGKWVVQKYIERPLLIFGTKFDLRQWFLVTDWNPLTVWFYRDSYIRFSTQPFSLKNLDNSVHLCNNSIQKHLENSCHRHPLLPPDNMWSSQRFQAHLQEMGAPNAWSTIIVPGMKDAVIHALQTSQDTVQCRKASFELYGADFVFGEDFQPWLIEINASPTMAPSTAVTARLCAGVQADTLRVVIDRMLDRNCDTGAFELIYKQPVTTSPASTPRPSCLLPMYSDTRARSSDDSTASWWALRPCRPQARP

SEQ ID NO: 5268 - protein, 340 aa, Homo Sapiens
PPPEPRLPFSLCRHNETQKERQPLDHREGPICTMTETTKTHVILLACGSFNPITKGHIQMFERARDYLHKTGRFIVIGGIVSPVHDSYGKQGLVSSRHRLIMCQLAVQNSDWIRVDPWECYQDTWQTTCSVLEHHRDLMKRVTGCILSNVNTPSMTPVIGQPQNETPQPIYQNSNVATKPTAAKILGKVGESLSRICCVRPPVERFTFVDENANLGTVMRYEEIELRILLLCGSDLLESFCIPGLWNEADMEVIVGDFGIVVVPRDAADTDRIMNHSSILRKYKNNIMVVKDDINHPMSVVSSTKSRLALQHGDGHVVDYLSQPVIDYILKSQLYINASG

SEQ ID NO: 5269 - protein, 1095 aa, Homo Sapiens
GEGCCTMAVFDTPEEAFGVLRPVCVQLTKTQTVENVEHLQTRLQAVSDSALQELQQYILFPLRFTLKTPGPKRERLIQSVVECLTFVLSSTCVKEQELLQELFSELSACLYSPSSQKPAAVSEELKLAVIQGLSTLMHSAYGDIILTFYEPSILPRLGFAVSLLLGLAEQEKSKQIKIAALKCLQVLLLQCDCQDHPRSLDELEQKQLGDLFASFLPGISTALTRLITGDFKQGHSIVVSSLKIFYKTVSFIMADEQLKRISKVQAKPAVEHRVAELMVYREADWVKKTGDKLTILIKKIIECVSVHPHWKVRLELVELVEDLLLKCSQSLVECAGPLLKALVGLVNDESPEIQAQCNKVLRHFADQKVVVGNKALADILSESLHSLATSLPRLMNSQDDQGKFSTLSLLLGYLKLLGPKINFVLNSVAHLQRLSKALIQVLELDVADIKIVEERRWNSDDLNASPKTSATQPWNRIQRRYFRFFTDERIFMLLRQVCQLLGYYGNLYLLVDHFMELYHQSVVYRKQAAMILNELVTGAAGLEVEDLHEKHIKTNPEELREIVTSILEEYTSQENWYLVTCLETEEMGEELMMEHPGLQAITSGEHTCQVTSFLAFSKPSPTICSMNSNIWQICIQLEGIGQFAYALGKDFCLLLMSALYPVLEKAGDQTLLISQVATSTMMDVCRACGYDSLQHLINQNSDYLVNGISLNLRHLALHPHTPKVLEVMLRNSDANLLPLVADVVQDVLATLDQFYDKRAASFVSVLHALMAALAQWFPDTGNLGHLQEQSLGEEGSHLNQRPAALEKSTTTAEDIEQFLLNYLKEKDVADGNVSDFDNEEEEQSVPPKVDENDTRPDVEPPLPLQIQIAMDVMERCIHLLSDKNLQIRLKVLDVLDLCVVVLQSHKNQLLPLAHQAWPSLVHRLTRDAPLAVLRAFKVLRTLGSKCGDFLRSRFCKDVLPKLAGSLVTQAPISARAGPVYSHTLAFKLQLAVLQGLGPLCERLDLGEGDLNKVADACLIYLSVKQPVKLQEAARSVFLHLMKVDPDSTWFLLNELYCPVQFTPPHPSLHPVQLHGASGQQNPYTTNVLQLLKELQ

SEQ ID NO: 5270 - protein, 153 aa, Homo Sapiens
MHYVHVHRVTTQPRNKPQTKCPSGGQSQGPRGQFLDTVLAAMCPIAMLLTADPGMPPTCLWHTPHAKHKEHLSIHLNMVPKCVHMHVTHTHTNSGSRYVGKYILLIKWSLAMYFVQGSTLSTVTKMSHGKALPDSDTYIQFPNQQGPHTPSIP

SEQ ID NO: 5271 - protein, 368 aa, Homo Sapiens
QSQIGWSPSFGQVSVQEMRAENGPSEPSQKGKAQSSTLLLHIPPCCSNPRSSGTMEDKRNIQIIEWEHLDKKKFYVFGVAMTMMIRVSVYPFTLIRTRLQVQKGKSLYHGTFDAFIKILRADGITGLYRGFLVNTFTLISGQCYVTTYELTRKFVADYSQSNTVKSLVAGGSASLVAQSITVPIDVVSQHLMMQRKGEKMGRFQVRGNPEGQGVVAFGQTKDIIRQILQADGLRGFYRGYVASLLTYIPNSAVWWPFYHFYAEQLSYLCPKECPHIVFQAVSGPLAAATASILTNPMDVIRTRVQVEGKNSIILTFRQLMAEEGPWGLMKGLSARIISATPSTIVIVVGYESLKKLSLRPELVDSRHW

SEQ ID NO: 5272 - protein, 45 aa, Homo Sapiens
MARGSALLLASLLLAAALSASAGLWSPAKEKRGWTLNSAGYLLGP

SEQ ID NO: 5273 - protein, 541 aa, Homo Sapiens
MKSYTPYFILLWSAVGIAKAAKIIIVPPIMFESHMYIFKTLASALHERGHHTVFLLSEGRDIAPSNHYSLQRYPGIFNSTTSDAFLQSKMRNIFSGRLTAIELFDILDHYTKNCDLMVGNHALIQGLKKEKFDLLLVDPNDMCGFVIAHLLGVKYAVFSTGLWYPAEVGAPAPLAYVPEFNSLLTDRMNLLQRMKNTGVYLISRLGVSFLVLPKYERIMQKYNLLPEKSMYDLVHGSSLWMLCTDVALEFPRPTLPNVVYVGGILTKPASPLPEDLQRWVNGANEHGFVLVSFGAGVKYLSEDIANKLAGALGRLPQKVIWRFSGPKPKNLGNNTKLIEWLPQNDLLGHSKIKAFLSHGGLNSIFETMYHGVPVVGIPLFGDHYDTMTRVQAKGMGILLEWKTVTEKELYEALVKVINNPSYRQRAQKLSEIHKDQPGHPVNRTIYWIDYIIRHNGAHHLRAAVHQISFCQYFLLDIAFVLLLGAALLYFLLSWVTKFIYRKIKSLWSRNKHSTVNGHYHNGILNGKYKRNGHIKHEKKVK

SEQ ID NO: 5274 - protein, 258 aa, Homo Sapiens
APLAEPLAPRDVFIAVKTTKKFHRARLDLLLETWISRHKEMTFIFTDGEDEALARHTGNVVITNCSAAHSRQALSCKMAVEYDRFIESGRKWFCHVDDDNYVNLRALLRLLASYPHTRDVYVGKPSLDRPIQAMERVSENKVRPVHFWFATGGAGFCISRGLALKMSPWASGGHFMNTAERIRLPDDCTIGYIVEALLGVPLIRSGLFHSHLENLQQVPTSELHEQVTLSYGMFENKRNAVHVKGPFSVEADPSRWGN

SEQ ID NO: 5275 - protein, 950 aa, Homo Sapiens
TDEGARCAPALRPRGSGRQVALPTMKKTRSTTLRRAWPSSDFSDRASDRMRSRSEKDYRLHKRFPAAFAPQASRGYMTSGDVSPISMSPISQSQFIPLGEILCLAISAMNSARKPVTQEALMEHLTTCFPGVPTPSQEILRHTLNTLVRERKIYPTPDGYFIVTPQTYFITPSLIRTNSKWYHLDERIPDRSQCTSPQPGTITPSASGCVRERTLPRNHCDSCHCCREDVHSTHAPTLQRKSAKDCKDPYCPPSLCQVPPTEKSKSTVNFSYKTETLSKPKDSEKQSKKFGLKLFRLSFKKDKTKQLANFSAQFPPEEWPLRDEDTPATIPREVEMEIIRRINPDLTVENVMRHTALMKKLEEEKAQRSKAGSSAHHSGRSKKSRTHRKSHGKSRSHSKTRVSKGDPSDGSHLDIPAEREYDFCDPLTRVPREGCFIIEHKGDNFIMHSNTNVLESHFPMTPEWDVSGELAKRRTEMPFPEPSRGSSHSKVHRSHSHTQDRRSRNERSNKAKERSRSMDNSKGPLGASSLGTPEDLAEGCSQDDQTPSQSYIDDSTLRPAQTVSLQRAHISSTSYKEVCIPEIVSGSKEPSSACSLLEPGKPPESLPSYGELNSCPTKTATDDYFQCNTSSETVLTAPSPLGKNKEDHDTLTLAEGVKKLSPSDRQVPHSSREPVGHKEESPKGPGGGPAASGGVAEGIANGRLVQHHGAEPSSLDKRKEIFSKDTLFKPLHSTLSVNSYHKSSLSLLKSHPKTPADTLPGRCEKLEPSLGTSAAQAMPASQRQQESGGNQEASFDYYNVSDDDDSEEGANKNTEEEKNREDVGTMQWLLEREKERDLQRKFEKNLTLLAPKETDSSSNQRATHSARLDSMDSSSITVDSGFNSPRTRESLASNTSSIVESNRRQNPALSPAHGGAGPAFNFRASAEPPTNEAEKLQKPSNCLQASVTSV

SEQ ID NO: 5276 - protein, 290 aa, Homo Sapiens
MDIEAYLERIGYKKSRNKLDLETLTDILQHQIRAVPFENLNIHCGDAMDLGLEAIFDQVVRRNRGGWCLQVNHLLYWALTTIGFETTMLGGYVYSTPAKKYSTGMIHLLLQVTIDGTNYIVDAGFGRSYQMWQPLELISGKDQPQVPCVFRLTEENGFWYLDQIRTQQYIPNEEFLHSDLLEDSKYRKIYSFTLKPRTIEDFESMNTYLQTSPSSVFTSKSFCSLQTPDGVHCLVGFTLTHRRFNYKDNTDLIEFKTLSEEEIEKVLKNIFNISLQRKLVPKHGDRFFTI

SEQ ID NO: 5277 - protein, 265 aa, Homo Sapiens [sequence omitted]

SEQ ID NO: 5278 - protein, 301 aa, Homo Sapiens
MLPLTMTVLILLLLPTGQAAPKDGVTRPDSEVQHQLLPNPFQPGQEQLGLLQSYLKGLGRTEVQLEHLSREQVLLYLFALHDYDQSGQLDGLELLSMLTAALAPGAANSPTTNPVILIVDKVLETQDLNGDGLMTPAELINFPGVALRHVEPGEPLAPSPQEPQAVGRQSLLAKSPLRQETQEAPGPREEAKGQVEARRESLDPVQEPGGQAEADGDVPGPRGEAEGQAEAKGDAPGPRGEAEGQAEAKGDAPGPRGEAGGQAEARENGEEAKELPGETLESKNTQNDFEVHIVQVENDEI

SEQ ID NO: 5279 - protein, 431 aa, Homo Sapiens [sequence omitted]

SEQ ID NO: 5280 - protein, 254 aa, Homo Sapiens
MGLSIFLLLCVLGLSQAATPKIFNGTECGRNSQPWQVGLFEGTSLRCGGVLIDHRWVLTAAHCSGSRYWVRLGEHSLSQLDWTEQIRHSGFSVTHPGYLGASTSHEHDLRLLRLRLPVRVTSSVQPLPLPNDCATAGTECHVSGWGITNHPRNPFPDLLQCLNLSIVSHATCHGVYPGRITSNMVCAGGVPGQDACQGDSGGPLVCGGVLQGLVSWGSVGPCGQDGIPGVYTYICNSTLVGLGTSWNFNSCQPF

SEQ ID NO: 5281 - protein, 158 aa, Homo Sapiens
MGHPPVSPSAPAPAGTTAIPGLIPDLVAGTPCELWDSQEGCGDNPAKWGLQLSTDALSLASTPGPRWALIAGALAAGVLLVSCLLCAACCCCRRHRKKPRDKESVGLGSARGTTTTHLVRSGSLLTQSREGLKSRLQSPGQRGEFSPRDGLTPTEAGR

SEQ ID NO: 5282 - protein, 790 aa, Homo Sapiens
MKAFGPPHEGPLQGLVASRIETYGGRHRASAQSTTGRLYPRGYPVLDPSRRRLQQYVPFARGSGQARGLSPMRLRDPEPEKRHGGHVGAGLLHSPKLKELTKAHELEVRLHTFSMFGMPRLPPEDRRHWEIGEGGDSGLTIEKSWRELVPGHKEMSQELCHQQEALWELLTTELIYVRKLKIMTDLLAAGLLNLQRVGLLMEVSAETLFGNVPSLIRTHRSFWDEVLGPTLEETRASGQPLDPIGLQSGFLTFGQRFHPYVQYCLRVKQTMAYAREQQETNPLFHAFVQWCEKHKRSGRQMLCDLLIKPHQRITKYPLLLHAVLKRSPEARAQEALNAMIEAVESFLRHINGQVRQGEEQESLAAAAQRIGPYEVLEPPSDEVEKNLRPFSTLDLTSPMLGVASEHTRQLLLEGPVRVKEGREGKLDVYLFLFSDVLLVTKPQRKADKAKVIRPPLMLDKLVCQPLRDPNSFLLIHLTEFQCVSSALLVHCPSPTDRAQWLEKTQQAQAALQKLKAEEYVQQKRELLTLYRDQDRESPSTRPSTPSLEGSQSSAEGRTPEFSTIIPHLVVTEDTDEDAPLVPDDTSDSGYGTLIPGTPTGSRSPLSRLRQRALRRDPRLTFSTLELRDIPLRPHPPDPQAPQRRSAPELPEGILKGGSLPQEDPPTWSEEEDGASERGNVVVETLHRARLRGQLPSSPTHADSAGESPWESSGEEEEEGPLFLKAGHTSLRPMRAEDMLREIREELASQRIEGAEEPRDSRPRKLTRAQLQRMRGPHIIQLDTPLSASEV

SEQ ID NO: 5283 - protein, 608 aa, Homo Sapiens
MAESIIIRVQSPDGVKRITATKRETAATFLKKVAKEFGFQNNGFSVYINRNKTGEITASSNKSLNLLKIKHGDLLFLFPSSLAGPSSEMETSVPPGFKVFGAPNVVEDEIDQYLSKQDGKIYRSRDPQLCRHGPLGKCVHCVPLEPFDEDYLNHLEPPVKHMSFHAYIRKLTGGADKGKFVALENISCKIKSGCEGHLPWPNGICTKCQPSAITLNRQKYRHVDNIMFENHTVADRFLDFWRKTGNQQFGYLYGRYTEHKDIPLGIRAEVAAIYEPPQIGTQNSLELLEDPKAEVVDEIAAKLGLRKVGWIFTDLVSEDTRKGTVRYSRNKDTYFLSSEECITAGDFQNKHPNMCRLSPDGHFGSKFVTAVATGGPDNQVHFEGYQVSNQCMALVRDECLLPCKDAPELGYAKESSSEQYVPDVFYKDVDKFGNEITQLARPLPVEYLIIDITTTFPKDPVYTFSISQNPFPIENRDVLGETQDFHSLATYLSQNTSSVFLDTISDFHLLLFLVTNEVMPLQDSISLLLEAVRTRNEELAQTWKRSEQWATIEQLCSTVGGQLPGLHEYGAVEGSTHTATAAMWACQHCTFMNQPGTGHCEMCSLPRT

SEQ ID NO: 5284 - protein, 786 aa, Homo Sapiens
MGSGGVVHCRCAKCFCYPTKRRIRRRPRNLTILSLPEDVLFHILKWLSVEDILAVRAVHSQLKDLVDNHASVWACASFQELWPSPGNLKLFERAAEKGNFEAAVKLGIAYLYNEGLSVSDEARAEVNGLKASRFFSLAERLNVGAAPFIWLFIRPPWSVSGSCCKAVVHESLRAECQLQRTHKASILHCLGRVLSLFEDEEKQQQAHDLFEEAAHQGCLTSSYLLWESDRRTDVSDPGRCLHSFRKLRDYARKGCWEAQLSLAKACANANQLGLEVRASSEIVCQLFQASQAVSKQQVFSVQKGLNDTMRYILIDWLVEVATMNDFTSLCLHLTVECVDRYLRRRLVPRYRLQLLGIACMVICTRFISKEILTIREAVWLTDNTYKYEDLVRMMGEIVSALEGKIRVPTVVDYKEVLLTLVPVELRTQHLCSFLCELSLLHTSLSAYAPARLAAAALLLARLTHGQTQPWTTQLWDLTGFSYEDLIPCVLSLHKKCFHDDAPKDYRQVSLTAVKQRFEDKRYGEISQEEVLSYSQLCAALGVTQDSPDPPTFLSTGEIHAFLSSPSGRRTKRKRENSLQEDRGSFVTTPTAELSSQEETVLGSFLDWSLDCCSGYEGDQESEGEKEGDVTAPSGILDVTVVYLNPEQHCCQESSDEEACPEAKGPQDPQALALDTQIPATPGPKPLVRTSREPGKDVTTSGYSSVSTASPTSSVDGGLGALPQPTSVLSLHSDSHTQPCHHQARKSCLQCRPPSPPESSVPQQQVKRINLCIHSEEEDMNLGLVRL

SEQ ID NO: 5285 - protein, 478 aa, Homo Sapiens
MAASRLAALEGVDSGPRVPGASPGFLYSEGQRLALEALLSKGAEAFQTCVQREELWPFLSADEVQGLAAAAEDWTVAKQEPSGMAEGATTADVDAGSLSYWPGQSEQPAPVLRLGWPVDSAWKGITRAQLYTQPPGEGQPPLKELVRLEIQAAHKLVAVVMDVFTDPDLLLDLVDAATRRWVPVYLLLDRQQLPAFLELAQQLGVNPWNTENVDVRVVRGCSFQSRWRRQVSGTVREKFVLLDGERVISGSYSFTWSDARLHRGLVTLLTGEIVDAFSLEFRTLYAASCPLPPAPPQKPSVIGGLQRGRSLHRVSRRRSVAPASPPPPDGPLAHRLAACRVSPATPGPALSDILRSVQRARTPSGPPARPSRSMWDLSRLSQLSGSSDGDNELKKSWGSKDTPAKALMRQRGTGGGPWGEVDSRSPWGGALPLPPAHRLRYLSPARRRFGGDATFKLQEPRGIRPSDWAPRAGLGGQP

SEQ ID NO: 5286 - protein, 354 aa, Homo Sapiens
MSAFDMSHDFFFCLTSEWEIQPRTKRSSLQQGFLKNQIFTGIQMQTRSYSGWKLCENCGEVFSEQFCLKTHMRAQNGGNTFEGNCYGKDSISVHKEASIGQELSKLNPCGKVFTLTPGLAVHLEILNGRQPYECKECGKGFKYFASLDNHMGIHIGEKLCEFQECERAITTSSHLKQCVAVHTGKKSEKTKNCGKSFTNFSQLSAHAKTHKGEKSFECKECGRSFRNSSSFNVHIQIHTGIKPHKCTECGKAFTRSTHLTQHVRTHTGIKPYECKECGQAFTQYTGLAIHIRNHTGEKPYQCKECGRAFNRSSTLTQHRRIHTGEKPYECVECGKTFITSSHRSKHLKTHSGER

SEQ ID NO: 5287 - protein, 748 aa, Homo Sapiens
MVLLRVLILLLSWAAGMGGQYGNPLNKYIRHYEGLSYNVDSLHQKHQRAKRAVSHEDQFLRLDFHAHGRHFNLRMKRDTSLFSDEFKVETSNKVLDYDTSHIYTGHIYGEEGSFSHGSVIDGRFEGFIQTRGGTFYVEPAERYIKDRTLPFHSVIYHEDDINYPHKYGPQGGCADHSVFERMRKYQMTGVEEVTQIPQEEHAANGPELLRKKRTTSAEKNTCQLYIQTDHLFFKYYGTREAVIAQISSHVKAIDTIYQTTDFSGIRNISFMVKRIRINTTADEKDPTNPFRFPNIGVEKFLELNSEQNHDDYCLAYVFTDRDFDDGVLGLAWVGAPSGSSGGICEKSKLYSDGKKKSLNTGIITVQNYGSHVPPKVSHITFAHEVGHNFGSPHDSGTECTPGESKNLGQKENGNYIMYARATSGDKLNNNKFSLCSIRNISQVLEKKRNNCFVESGQPICGNGMVEQGEECDCGYSDQCKDECCFDANQPEGRKCKLKPGKQCSPSQGPCCTAQCAFKSKSEKCRDDSDCAREGICNGFTALCPASDPKPNFTDCNRHTQVCINGQCAGSICEKYGLEECTCASSDGKDDKELCHVCCMKKMDPSTCASTGSVQWSRHFSGRTITLQPGSPCNDFRGYCDVFMRCRLVDADGPLARLKKAIFSPELYENIAEWIVAHWWAVLLMGIALIMLMAGFIKICSVHTPSSNPKLPPPKPLPGTLKRRRPPQPIQQPQRQRPRESYQMGHMRR

SEQ ID NO: 5288 - protein, 789 aa, Homo Sapiens
MAATTANPEMTSDVPSLGPAIASGNSGPGIQGGGAIVQRAIKRRPGLDFDDDGEGNSKFLRCDDDQMSNDKERFARSDDEQSSADKERLARENHSEIERRRRNKMTAYITELSDMVPTCSALARKPDKLTILRMAVSHMKSLRGTGNTSTDGSYKPSFLTDQELKHLILEAADGFLFIVSCETGRVVYVSDSVTPVLNQPQSEWFGSTLYDQVHPDDVDKLREQLSTSENALTGRILDLKTGTVKKEGQQSSMRMCMGSRRSFICRMRCGSSSVDPVSVNRLSFVRNRCRNGLGSVKDGEPHFVVVHCTGYIKAWPPAGVSLPDDDPEAGQGSKFCLVAIGRLQVTSSPNCTDMSNVCQPTEFISRHNIEGIFTFVDHRCVATVGYQPQELLGKNIVEFCHPEDQQLLRDSFQQVVKLKGQVLSVMFRFRSKNQEWLWMRTSSFTFQNPYSDEIEYIICTNTNVKNSSQEPRPTLSNTIQRPQLGPTANLPLEMGSGQLAPRQQQQQTELDMVPGRDGLASYNHSQVVQPVTTTGPEHSKPLEKSDGLFAQDRDPRFSEIYHNINADQSKGISSSTVPATQQLFSQGNTFPPTPRPAENFRNSGLAPPVTIVQPSASAGQMLAQISRHSNPTQGATPTWTPTTRSGFSAQQVATQATAKTRTSQFGVGSFQTPSSFSSMSLPGAPTASPGAAAYPSLTNRGSNFAPETGQTAGQFQTRTAEGVGVWPQWQGQQPHHRSSSSEQHVQQPPAQQPGQPEVFQEMLSMLGDQSNSYNNEEFPDLTMFPPFSE

SEQ ID NO: 5289 - protein, 1251 aa, Homo Sapiens
MSTERDSETTFDEDSQPNDEVVPYSDDETEDELDDQGSAVEPEQNRVNREAEENREPFRKECTWQVKANDRKYHEQPHFMNTKFLCIKESKYANNAIKTYKYNAFTFIPMNLFEQFKRAANLYFLALLILQAVPQISTLAWYTTLVPLLVVLGVTAIKDLVDDVARHKMDKEINNRTCEVIKDGRFKVAKWKEIQVGDVIRLKKNDFVPADILLLSSSEPNSLCYVETAELDGETNLKFKMSLEITDQYLQREDTLATFDGFIECEEPNNRLDKFTGTLFWRNTSFPLDADKILLRGCVIRNTDFCHGLVIFAGADTKIMKNSGKTRFKRTKIDYLMNYMVYTIFVVLILLSAGLAIGHAYWEAQVGNSSWYLYDGEDDTPSYRGFLIFWGYIIVLNTMVPISLYVSVEVIRLGQSHFINWDLQMYYAEKDTPAKARTTTLNEQLGQIHYIFSDKTGTLTQNIMTFKKCCINGQIYGDHRDASQHNHNKIEQVDFSWNTYADGKLAFYDHYLIEQIQSGKEPEVRQFFFLLAVCHTVMVDRTDGQLNYQAASPDEGALVNAARNFGFAFLARTQNTITISELGTERTYNVLAILDFNSDRKRMSIIVRTPEGNIKLYCKGADTVIYERLHRMNPTKQETQDALDIFANETLRTLCLCYKEIEEKEFTEWNKKFMAASVASTNRDEALDKVYEEIEKDLILLGATAIEDKLQDGVPETISKLAKADIKIWVLTGDKKETAENIGFACELLTEDTTICYGEDINSLLHARMENQRNRGGVYAKFAPPVQESFFPPGGNRALIITGSWLNEILLEKKTKRNKILKLKFPRTEEERRMRTQSKRRLEAKKEQRQKNFVDLACECSAVICCRVTPKQKAMVVDLVKRYKKAITLAIGDGANDVNMIKTAHIGVGISGQEGMQAVMSSDYSFAQFRYLQRLLLVHGRWSYIRMCKFLRYFFYKNFAFTLVHFWYSFFNGYSAQTAYEDWFITLYNVLYTSLPVLLMGLLDQDVSDKLSLRFPGLYIVGQRDLLFNYKRFFVSLLHGVLTSMILFFIPLGAYLQTVGQDGEAPSDYQSFAVTIASALVITVNFQIGLDTSYWTFVNAFSIFGSIALYFGIMFDFHSAGIHVLFPSAFQFTGTASNALRQPYIWLTIILTVAVCLLPVVAIRFLSMTIWPSESDKIQKHRKRLKAEEQWQRRQQVFRRGVSTRRSAYAFSHQRGYADLISSGRSIRKKRSPLDAIVADGTAEYRRTGDS

SEQ ID NO: 5290 - protein, 902 aa, Homo Sapiens
LIVSQTMNYVGQLAGQVIVTVKELYKGINQATLSGCIDVIVVQQQDGSYQCSPFHVRFGKLGVLRSKEKVIDIEINGSAVDLHMKLGDNGEAFFVEETEEEYEKLPAYLATSPIPTEDQFFKDIDTPLVKSGGDETPSQSSDISHVLETETIFTPSSVKKKKRRRKKYKQDSKKEEQAASAAAEDTCDVGVSSDDDKGAQAARGSSNASLKEEECKEPLLFHSGDHYPLSDGDWSPLETTYPQTACPKSDSELEVKPAESLLRSESHMEWTWGGFPESTKVSKRERSDHHPRTATITPSENTHFRVIPSEDNLISEVEKDASMEDTVCTIVKPKPRALGTQMSDPTSVAELLEPPLESTQISSMLDADHLPNAALAEAPSESKPAAKVDSPSKKKGVHKRSQHQGPDDIYLDDLKGLEPEVAALYFPKSESEPGSRQWPESDTLSGSQSPQSVGSAAADSGTECLSDSAMDLPDVTLSLCGGLSENGEISKEKFMEHIITYHEFAENPGLIDNPNLVIRIYNRYYNWALAAPMILSLQVFQKSLPKATVESWVKDKMPKKSGRWWFWRKRESMTKQLPESKEGKSEAPPASDLPSSSKEPAGARPAENDSSSDEGSQELEESITVDPIPTEPLSHGSTTSYKKSLRLSSDQIAKLKLHDGPNDVVFSITTQYQGTCRCAGTIYLWNWNDKIIISDIDGTITKSDALGQILPQLGKDWTHQGIAKLYHSINENGYKFLYCSARAIGMADMTRGYLHWVNDKGTILPRGPLMLSPSSLFSAFHREVIEKKPEKFKIECLNDIKNLFAPSKQPFYAAFGNRPNDVYAYTQVGVPDCRIFTVNPKGELIQERTKGNKSSYHRLSELVEHVFPLLSKEQNSAFPCPEFSSFCYWRDPIPEVDLDDLS

SEQ ID NO: 5291 - protein, 755 aa, Homo Sapiens
MAGCIPEEKTYRRFLELFLGEFRGPCGGGEPEPEPEPEPEPEPESEPEPEPELVEAEAAEASVEEPGEEAATVAATEEGDQEQDPEPEEEAAVEGEEEEEGAATAAAAPGHSAVPPPPPQLPPLPPLPRPLSERITREEVEGESLDLCLQQLYKYNCPSFLAAALARATSDEVLQSDLSAHYIPKETDGTEGTVEIETVKLARSVFSKLHEICCSWVKDFPLRRRPQLYYETSIHAIKNMRRKMEDKHVCIPDFNMLFNLEDQEEQAYFAVFDGHGGVDAAIYASIHLHVNLVRQEMFPHDPAEALCRAFRVTDERFVQKAARESLRCGTTGVVTFIRGNMLHVAWVGDSQVMLVRKGQAVELMKPHKPDREDEKQRIEALGGCVVWFGAWRVNGSLSVSRAIGDAEHKPYICGDADSASTVLDGTEDYLILACDGFYDTVNPDEAVKVVSDHLKENNGDSSMVAHKLVASARDAGSSDNITVIVVFLRDMNKAVNVSEESDWTENSFQGGQEDGGDDKENHGECKRPWPQHQCSAPADLGYDGRVDSFTDRTSLSPGSQINVLEDPGYLDLTQIEASKPHSAQFLLPVEMFGPGAPKKANLINELMMEKKSVQSSLPEWSGAGEFPTAFNLGSTGEQIYRMQSLSPVCSGLENEQFKSPGNRVSRLSHLRHHYSKKWHRFRFNPKFYSFLSAQEPSHKIGTSLSSLTGSGKRNRIRSSLPWRQNSWKGYSENMRKLRKTHDIPCPDLPWSYKIE

SEQ ID NO: 5292 - protein, 4590 aa, Homo Sapiens
MGRHLALLLLLLLLFQHFGDSDGSQRLEQTPLQFTHLEYNVTVQENSAAKTYVGHPVKMGVYITHPAWEVRYKIVSGDSENLFKAEEYILGDFCFLRIRTKGGNTAILNREVKDHYTLIVKALEKNTNVEARTKVRVQVLDTNDLRPLFSPTSYSVSLPENTAIRTSIARVSATDADIGTNGEFYYSFKDRTDMFAIHPTSGVIVLTGRLDYLETKLYEMEILAADRGMKLYGSSGISSMAKLTVHIEQANECAPVITAVTLSPSELDRDPAYAIVTVDDCDQGANGDIASLSIVAGDLLQQFRTVRSFPGSKEYKVKAIGDIDWDSHPFGYNLTLQAKDKGTPPQFSSVKVIHVTSPQFKAGPVKFEKDVYRAEISEFAPPNTPVVMVKAIPAYSHLRYVFKRTPGKAKFSLNYNTGLISILEPVKRQQAAHFELEVTTSDRKASTKVLVKVLGANSNPPEFTQTAYKAAFDENVPIGTTIMSLSAVDPDEGENGYVTYSIANLNHVPFAIDHFTGAVSTSENLDYELMPRVYTLRIRASDWGLPYRREVEVLATITLNNLNDNTPLFEKINCEGTIPRDLGVGEQITTVSAIDADELQLVQYQIEAGNELDLFSLNPNSGVLSLKRSLMDGLGAKVSFHSLRITATDGENFATPLYINITVAASHKLVNLQCEETGVAKMLAEKLLQANKLHNQGEVEDIFFDSHSVNAHIPQFRSTLPTGIQVKENQPVGSSVIFMNSTDLDTGFNGKLVYAVSGGNEDSCFMIDMETGMLKILSPLDRETTDKYTLNITVYDLGIPQKAAWRLLHVVVVDANDNPPEFLQESYFVEVSEDKEVHSEIIQVEATDKDLGPNGHVTYSILTDTDTFSIDSVTGVVNIARPLDRELQHEHSLKIEARDQAREEPQLFSTVVVKVSLEDVNDNPPTFIPPNYRVKVREDLPEGTVIMWLEAHDPDLGQSGQVRYSLLDHGEGNFDVDKLSGAVRIVQQLDFEKKQVYNLTVRAKDKGKPVSLSSTCYVEVEVVDVNENLHPPVFSSFVEKGTVKEDAPVGSLVMTVSAHDEDAGRDGEIRYSIRDGSGVGVFKIGEETGVIETSDRLDRESTSHYWLTVFATDQGVVPLSSFIEIYIEVEDVNDNAPQTSEPVYYPEIMENSPKDVSVVQIEAFDPDSSSNDKLMYKITSGNPQGFFSIHPKTGLITTTSRKLDREQQDEHILEVTVTDNGSPPKSTIARVIVKILDENDNKPQFLQKFYKIRLPEREKPDRERNARREPLYRVIATDKDEGPNAEISYSIEDGNEHGKFFIEPKTGVVSSKRFSAAGEYDILSIKAVDNGRPQKSSTTRLHIEWISKPKQSLEPISFEESFFTFTVMESDPVAHMIGVISVEPPGIPLWFDITGGNYDSHFDVDKGTGTIIVAKPLDAEQKSNYNLTVEATDGTTTILTQVFIKVIDTNDHRPQFSTSKYEVVIPEDTAPETEILQISAVDQDEKNKLIYTLQSSRDPLSLKKFRLDPATGSLYTSEKLDHEAVSPAHLTVMVRDQDVPVKRNFARIVVNVSDTNDHAPWFTASSYKGRVYESAAVGSVVLQVTALDKDKGKNAEVLYSIESGNIGNIGNSFMIDPVLGSIKTAKELDRSNQAEYDLMVKATDKGSPPMSEITSVRIFVTIADNASPKFTSKEYSVELSETVSIGSFVGMVTAHSQSSVVYEIKDGNTGDAFDINPHSGTIITQKALDFETLPIYTLIIQGTNMAGLSTNTTVLVHLQDENDNAPVFMQAEYTGLISESASINSVVLTDRNVPLVIRAADADKDSNALLVYHIVEPSVHTYFAIDSSTGAIHTVLSLDYEETSIFHFTVQVHDMGTPRLFAEYAANVTVHVIDINDCPPVFAKPLYEASLLLPTYKGVKVITVNATDADSSAFSQLIYSITEGNIGEKFSMDYKTGALTVQNTTQLRSRYELTVRASDGRFAGLTSVKINVKESKESHLKFTQDVYSAVVKENSTEAETLAVITAIGSPINEPLFYHILNPDRRFKISRTSGVLSTTGTPFDREQQEAFDVVVEVIEEHKPSAVAHVVVKVIVEDQNDNAPVFVNLPYYAVVKVDTEVGHVIRYVTAVDRDSGRNGEVHYYLKEHHEHFQIGPLGEISLKKQFELDTLNKEYLVTVVAKDGGNPAFSAEVIVPITVMNKAMPVFEKPFYSAEIAESIQVHSPVVHVQANSPEGLKVFYSITDGDPFSQFTINFNTGVINVIAPLDFEAHPAYKLSIRATDSLTGAHAEVFVDIIVDDINDNPPVFAQQSYAVTLSEASVIGTSVVQVRATDSDSEPNRGISYQMFGNHSKSHDHFHVDSSTGLISLLRTLDYEQSRQHTIFVRAVDGGMPTLSSDVIVTVDVTDLNGNPPLFEQQIYEARISEHAPHGHFVTCVKAYDADSSDIDKLQYSILSGNDHKHFVIDSATGIITLSNLHRHALKPFYSLNLSVSDGVFRSSTQVHVTVIGGNLHSPAFLQNEYEVELAENAPLHTLVMEVKTTDGDSGIYGHVTYHIVNDFAKDRFYINERGQIFTLEKLDRETPAEKVISVRLMAKDAGGKVAFCTVNVILTDDNDNAPQFRATKYEVNIGSSAAKGTSVVKSASDADEGSNADITYAIEADSESVKENLEINKLSGVITTKESLIGLENEFFTFFVRAVDNGSPSKESVVLVYVKILPPEMQLPKFSEPFYTFTVSEDVPVGTEIDLIRAEHSGTVLYSLVKGNTPESNRDESFVIDRQSGRLKLEKSLDHETTKWYQFSILARCTQDDHEMVASVDVSIQVKDANDNSPVFESSPYEAFIVENLPGGSRVIQIRASDADSGTNGQVMYSLDQSQSVEVIESFAINMETGWITTLKELDHEKRDNYQIKVVASDHGEKIQLSSTAIVDVTVTDVNDSPPRFTAEIYKGTVSEDDPQGGVIAILSTTDADSEEINRQVTYFITGGDPLGQFAVETIQNEWKVYVKKPLDREKRDNYLLTITATDGTFSSKAIVEVKVLDANDNSPVCEKTLYSDTIPEDVLPGKLIMQISATDADIRSNAEITYTLLGSGAEKFKLNPDTGELKTSTPLDREEQAVYHLLVRATDGGGRFCQASIVVTLEDVNDNAPEFSADPYAITVFENTEPGTLLTRVQATDADAGLNRKILYSLIDSADGQFSINELSGIIQLEKPLDRELQAVYTLSLKAVDQGLPRRLTATGTVIVSVLDINDNPPVFEYREYGATVSEDILVGTEVLQVYAASRDIEANAEITYSIISGNEHGKFSIDSKTGAVFIIENLDYESSHEYYLTVEATDGGTPSLSDVATVNVNVTDINDNTPVFSQDTYTTVISEDAVLEQSVITVMADDADGPSNSHIHYSIIDGNQGSSFTIDPVRGEVKVTKLLDRETISGYTLTVQASDNGSPPRVNTTTVNIDVSDVNDNAPVFSRGNYSVIIQENKPVGFSVLQLVVTDEDSSHNGPPFFFTIVTGNDEKAFEVNPQGVLLTSSAIKRKEKDHYLLQVKVADNGKPQLSSLTYIDIRVIEESIYPPAILPLEIFITSSGEEYSGGVIGKIHATDQDVYDTLTYSLDPQMDNLFSVSSTGGKLIAHKKLDIGQYLLNVSVTDGKFTTVADITVHIRQVTQEMLNHTIAIRFANLTPEEFVGDYWRNFQRALRNILGVRRNDIQIVSLQSSEPHPHLDVLLFVEKPGSAQISTKQLLHKINSSVTDIEEIIGVRILNVFQKLCAGLDCPWKFCDEKVSVDESVMSTHSTARLSFVTPRHHRAAVCLCKEGRCPPVHHGCEDDPCPEGSECVSDPWEEKHTCVCPSGRFGQCPGSSSMTLTGNSYVKYRLTENENKLEMKLTMRLRTYSTHAVVMYARGTDYSILEIHHGRLQYKFDCGSGPGIVSVQSIQVNDGQWHAVALEVNGNYARLVLDQVHTASGTAPGTLKTLNLDNYVFFGGHIRQQGTRHGRSPQVGNGFRGCMDSIYLNGQELPLNSKPRSYAHIEESVDVSPGCFLTATEDCASNPCQNGGVCNPSPAGGYYCKCSALYIGTHCEISVNPCSSNPCLYGGTCVVDNGGFVCQCRGLYTGQRCQLSPYCKDEPCKNGGTCFDSLDGAVCQCDSGFRGERCQSDIDECSGNPCLHGALCENTHGSYHCNCSHEYRGRHCEDAAPNQYVSTPWNIGLAEGIGIVVFVAGIFLLVVVFVLCRKMISRKKKHQAEPKDKHLGPATAFLQRPYFDSKLNKNIYSDIPPQVPVRPISYTPSIPSDSRNNLDRNSFEGSAIPEHPEFSTFNPESVHGHRKAVAVCSVAPNLPPPPPSNSPSDSDSIQKPSWDFDYDTKVVDLDPCLSKKPLEEKPSQPYSARESLSEVQSLSSFQSESCDDNGYHWDTSDWMPSVPLPDIQEFPNYEVIDEQTPLYSADPNAIDTDYYPGGYDIESDFPPPPEDFPAADELPPLPPEFSNQFESIHPPRDMPAAGSLGSSSRNRQRFNLNQYLPNFYPLDMSEPQTKGTGENSTCREPHAPYPPGYQRHFEAPAVESMPMSVYASTASCSDVSACCEVESEVMMSDYESGDDGHFEEVTIPPLDSQQHTEV

SEQ ID NO: 5293 - protein, 585 aa, Homo Sapiens
MTITYTSQVANARLGSFSRLLLCWRGSIYKLLYGEFLIFLLCYYIIRFIYRLALTEEQQLMFEKLTLYCDSYIQLIPISFVLGFYVTLVVTRWWNQYENLPWPDRLMSLVSGFVEGKDEQGRLLRRTLIRYANLGNVLILRSVSTAVYKRFPSAQHLVQAGFMTPAEHKQLEKLSLPHNMFWVPWVWFANLSMKAWLGGRIRDPILLQSLLNEMNTLRTQCGHLYAYDWISIPLVYTQVVTVAVYSFFLTCLVGRQFLNPAKAYPGHELDLVVPVFTFLQFFFYVGWLKVAEQLINPFGEDDDDFETNWIVDRNLQVSLLAVDEMHQDLPRMEPDMYWNKPEPQPPYTAASAQFRRASFMGSTFNISLNKEEMEFQPNQEDEEDAHAGIIGRFLGLQSHDHHPPRANSRTKLLWPKRESLLHEGLPKNHKAAKQNVRGQEDNKAWKLKAVDAFKSAPLYQRPGYYSAPQTPLSPTPMFFPLEPSAPSKLHSVTGIDTKDKSLKTVSSGAKKSFELLSESDGALMEHPEVSQVRRKTVEFNLTDMPEIPENHLKEPLEQSPTNIHTTLKDHMDPYWALENRDEAHS

SEQ ID NO: 5294 - protein, 1342 aa, Homo Sapiens
MRANDALQVLGLLFSLARGSEVGNSQAVCPGTLNGLSVTGDAENQYQTLYKLYERCEVVMGNLEIVLTGHNADLSFLQWIREVTGYVLVAMNEFSTLPLPNLRVVRGTQVYDGKFAIFVMLNYNTNSSHALRQLRLTQLTEILSGGVYIEKNDKLCHMDTIDWRDIVRDRDAEIVVKDNGRSCPPCHEVCKGRCWGPGSEDCQTLTKTICAPQCNGHCFGPNPNQCCHDECAGGCSGPQDTDCFACRHFNDSGACVPRCPQPLVYNKLTFQLEPNPHTKYQYGGVCVASCPHNFVVDQTSCVRACPPDKMEVDKNGLKMCEPCGGLCPKACEGTGSGSRFQTVDSSNIDGFVNCTKILGNLDFLITGLNGDPWHKIPALDPEKLNVFRTVREITGYLNIQSWPPHMHNFSVFSNLTTIGGRSLYNRGFSLLIMKNLNVTSLGFRSLKEISAGRIYISANRQLCYHHSLNWTKVLRGPTEERLDIKHNRPRRDCVAEGKVCDPLCSSGGCWGPGPGQCLSCRNYSRGGVCVTHCNFLNGEPREFAHEAECFSCHPECQPMGGTATCNGSGSDTCAQCAHFRDGPHCVSSCPHGVLGAKGPIYKYPDVQNECRPCHENCTQGCKGPELQDCLGQTLVLIGKTHLTMALTVIAGLVVIFMMLGGTFLYWRGRRIQNKRAMRRYLERGESIEPLDPSEKANKVLARIFKETELRKLKVLGSGVFGTVHKGVWIPEGESIKIPVCIKVIEDKSGRQSFQAVTDHMLAIGSLDHAHIVRLLGLCPGSSLQLVTQYLPLGSLLDHVRQHRGALGPQLLLNWGVQIAKGMYYLEEHGMVHRNLAARNVLLKSPSQVQVADFGVADLLPPDDKQLLYSEAKTPIKWMALESIHFGKYTHQSDVWSYGVTVWELMTFGAEPYAGLRLAEVPDLLEKGERLAQPQICTIDVYMVMVKCWMIDENIRPTFKELANEFTRMARDPPRYLVIKRESGPGIAPGPEPHGLTNKKLEEVELEPELDLDLDLEAEEDNLATTTLGSALSLPVGTLNRPRGSQSLLSPSSGYMPMNQGNLGGSCQESAVSGSSERCPRPVSLHPMPRGCLASESSEGHVTGSEAELQEKVSMCRSRSRSRSPRPRGDSAYHSQRHSLLTPVTPLSPPGLEEEDVNGYVMPDTHLKGTPSSREGTLSSVGLSSVLGTEEEDEDEEYEYMNRRRRHSPPHPPRPSSLEELGYEYMDVGSDLSASLGSTQSCPLHPVPIMPTAGTTPDEDYEYMNRQRDGGGPGGDYAAMGACPASEQGYEEMRAFQGPGHQAPHVHYARLKTLRSLEATDSAFDNPDYWHSRLFPKANAQRT

SEQ ID NO: 5295 - protein, 1105 aa, Homo Sapiens
MPATASAGVPATVSEKQEFYQLLKNLINPSCMVRRQAEEIYENIPGLCKTTFLLDAVRNRRAGYEVRQMAAALLRRLLSSGFEEVYPNLPADVQRDVKIELILAVKLETHASMRKKLCDIFAVLARNLIDEDGTNHWPEGLKFLIDSIYSKNVVLWEVALHVFWHFPGIFGTQERHDLDIIKRLLDQCIQDQEHPAIRTLSARAAAAFVLANENNIALFKDFADLLPGILQAVNDSCYQDDDSVLESLVEIADTVPKYLGPYLEDTLQLSLKLCGDSRLSNLQRQLALEVIVTLSETATPMLKKHTNIIAQAVPHILAMMVDLQDDEDWVNADEMEEDDFDSNAVAAESALDRLACGLGGKVVLPMTKEHIMQMLQSPDWKYRHAGLMALSAIGEGCHQQMESILDETVNSVLLFLQDPHPRVRAAACTTLGQMATDFAPNFQKKFHETVIAALLRTMENQGNQRVQSHAASALIIFIEDCPKSLLVLYVDSMVKNLHSVLVIKLQELIRNGTKLALEQLVTTIASVADTIEEKFVPYYDIFMPSLKHIVELAVQKELKLLRGKTIECISHIGLAVGKEKFMQDASNVMQLLLKTQSDLNNMEDDDPQTSYMVSAWARMCKILGKDFQQYLPLVIEPLIKTASAKPDVALLDTQDVENMSDDDGWQFVNLGDQQSFGIKTSGLEAKATACQMLVYYAKELREGFVEYTEQVVKLMVPLLKFYFHDNVRVAAAESMPFLLECARIRGPEYLAQMWQFICDPLIKAIGTEPDTDVLSEIMNSFAKSIEVMGDGCLNDEHLEELGGILKAKLEGHFKNQELRQVKRQEENYDQQVEMSLQDEDECDVYILTKVSDILHSLFSTYKEKILPWFEQLLPLIVNLICSSRPWPDRQWGLCIFDDIIEHCSPTSFKYVEYFRWPMLLNMRDNNPEVRQAAAYGLGVMAQFGGDDYRSLCSEAVPLLVKVIKCANSKTKKNVIATENCISAIGKILKFKPNCVNVDEVLPHWLSWLPLHEDKEEAIQTLSFLCDLIESNHPVVIGPNNSNLPKIISIIAEGKINETINYEDPCAKRLANVVRQVQTSEDLWLECVSQLDDEQQEALQELLNFA

SEQ ID NO: 5296 - protein, 532 aa, Homo Sapiens
MAPSSPRPALPALLVLLGALFPGPGNAQTSVSPSKVILPRGGSVLVTCSTSCDQPKLLGIETPLPKKELLLPGNNRKVYELSNVQEDSQPMCYSNCPDGQSTAKTFLTVYWTPERVELAPLPSWQPVGKNLTLRCQVEGGAPRANLTVVLLRGEKELKREPAVGEPAEVTTTVLVRRDHHGANFSCRTELDLRPQGLELFENTSAPYQLQTFVLPATPPQLVSPRVLEVDTQGTVVCSLDGLFPVSEAQVHLALGDQRLNPTVTYGNDSFSAKASVSVTAEDEGTQRLTCAVILGNQSQETLQTVTIYSFPAPNVILTKPEVSEGTEVTVKCEAHPRAKVTLNGVPAQPLGPRAQLLLKATPEDNGRSFSCSATLEVAGQLIHKNQTRELRVLYGPRLDERDCPGNWTWPENSQQTPMCQAWGNPLPELKCLKDGTFPLPIGESVTVTRDLEGTYLCRARSTQGEVTRKVTVNVLSPRYEIVIITVVAAAVIMGTAGLSTYLYNRQRKIKKYRLQQAQKGTPMKPNTQATPP

SEQ ID NO: 5297 - protein, 465 aa, Homo Sapiens
MEPSSLELPADTVQRIAAELKCHPTDERVALHLDEEDKLRHFRECFYIPKIQDLPPVDLSLVNKDENAIYFLGNSLGLQPKMVKTYLEEELDKWAKIAAYGHEVGKRPWITGDESIVGLMKDIVGANEKEIALMNALTVNLHLLMLSFFKPTPKRYKILLEAKAFPSDHYAIESQLQLHGLNIEESMRMIKPREGEETLRIEDILEVIEKEGDSIAVILFSGVHFYTGQHFNIPAITKAGQAKGCYVGFDLAHAVGNVELYLHDWGVDFACWCSYKYLNAGAGGIAGAFIHEKHAHTIKPALVGWFGHELSTRFKMDNKLQLIPGVCGFRISNPPILLVCSLHASLEIFKQATMKALRKKSVLLTGYLEYLIKHNYGKDKAATKKPVVNIITPSHVEERGCQLTITFSVPNKDVFQELEKRGVVCDKRNPNGIRVAPVPLYNSFHDVYKFTNLLTSILDSAETKN

SEQ ID NO: 5298 - protein, 384 aa, Homo Sapiens
MNSTLFSQVENHSVHSNFSEKNAQLLAFENDDCHLPLAMIFTLALAYGAVIILGVSGNLALIIIILKQKEMRNVTNILIVNLSFSDLLVAIMCLPFTFVYTLMDHWVFGEAMCKLNPFVQCVSITVSIFSLVLIAVERHQLIINPRGWRPNNRHAYVGIAVIWVLAVASSLPFLIYQVMTDEPFQNVTLDAYKDKYVCFDQFPSDSHRLSYTTLLLVLQYFGPLCFIFICYFKIYIRLKRRNNMMDKMRDNKYRSSETKRINIMLLSIVVAFAVCWLPLTIFNTVFDWNHQIIATCNHNLLFLLCHLTAMISTCVNPIFYGFLNKNFQRDLQFFFNFCDFRSRDDDYETIAMSTMHTDVSKTSLKQASPVAFKKINNNDDNEKI

SEQ ID NO: 5299 - protein, 433 aa, Homo Sapiens [sequence omitted]

SEQ ID NO: 5300 - protein, 45 aa, Homo Sapiens
PARMQTSCTKFYWRKRMPEHAKSAAELLPSCCCFHRPLVSFSSLL

SEQ ID NO: 5301 - protein, 693 aa, Homo Sapiens
MAALGVQSINWQTAFNRQAHHTDKFSSQELILRRGQNFQVLMIMNKGLGSNERLEFIVSTGPYPSESAMTKAVFPLSNGSSGGWSAVLQASNGNTLTISISSPASAPIGRYTMALQIFSQGGISSVKLGTFILLFNPWLNVDSVFMGNHAEREEYVQEDAGIIFVGSTNRIGMIGWNFGQFEEDILSICLSILDRSLNFRRDAATDVASRNDPKYVGRVLSAMINSNDDNGVLAGNWSGTYTGGRDPRSWNGSVEILKNWKKSGFSPVRYGQCWVFAGTLNTALRSLGIPSRVITNFNSAHDTDRNLSVDVYYDPMGNPLDKGSDSVWNFHVWNEGWFVRSDLGPSYGGWQVLDATPQERSQGVFQCGPASVIGVREGDVQLNFDMPFIFAEVNADRITWLYDNTTGKQWKNSVNSHTIGRYISTKAVGSNARMDVTDKYKYPEGSDQERQVFQKALGKLKPNTPFAATSSMGLETEEQEPSIIGKLKVAGMLAVGKEVNLVLLLKNLSRDTKTVTVNMTAWTIIYNGTLVHEVWKDSATMSLDPEEEAEHPIKISYAQYEKYLKSDNMIRITAVCKVPDESEVVVERDIILDNPTLTLEVLNEARVRKPVNVQMLFSNPLDEPVRDCVLMVEGSGLLLGNLKIDVPTLGPKERSRVRFDILPSRSGTKQLLADFSCNKFPAIKAMLSIDVAE

SEQ ID NO: 5302 - protein, 299 aa, Homo Sapiens
MFSLPLSLPLCEDTAFLPSKCCSSHKTIKQARTLIMIFLASGTHFQTMLKSKLNVLTLKKEPLPAVIFHEPEAIELCTTTPLMKTRTHSGCKHFQTMLKSKLNVLTLKKEPLPAVIFHEPEAIELCTTTPLMKTRTHSGCKVTYLGKVSTTGMQFLSGCTEKPVIELWKKHTLAREDVFPANALLEIRPFQVWLHHLDHKGEATVHMDTFQVARIAYCTADHNVSPNIFAWVYREINDDLSYQMDCHAVECESKLEAKKLAHAMMEAFRKTFHSMKSDGRIHSNSSSEEVSQELESDDG

SEQ ID NO: 5303 - protein, 841 aa, Homo Sapiens
MNKVRDIKNKFKNEDLTDELSLNKISADTTDNSGTVNQIMMMANNPEDWLSLLLKLEKNSVPLSDALLNKLIGRYSQAIEALPPDKYGQNESFARIQVRFAELKAIQEPDDARDYFQMARANCKKFAFVHISFAQFELSQGNVKKSKQLLQKAVERGAVPLEMLEIALRNLNLQKKQLLSEEEKKNLSASTVLTAQESFSGSLGHLQNRNNSCDSRGQTTKARFLYGENMPPQDAEIGYRNSLRQTNKTKQSCPFGRVPVNLLNSPDCDVKTDDSVVPCFMKRQTSRSECRDLVVPGSKPSGNDSCELRNLKSVQNSHFKEPLVSDEKSSELIITDSITLKNKTESSLLAKLEETKEYQEPEVPESNQKQWQAKRKSECINQNPAASSNHWQIPELARKVNTEQKHTTFEQPVFSVSKQSPPISTSKWFDPKSICKTPSSNTLDDYMSCFRTPVVKNDFPPACQLSTPYGQPACFQQQQHQILATPLQNLQVLASSSANECISVKGRIYSILKQIGSGGSSKVFQVLNEKKQIYAIKYVNLEEADNQTLDSYRNEIAYLNKLQQHSDKIIRLYDYEITDQYIYMVMECGNIDLNSWLKKKKSIDPWERKSYWKNMLEAVHTIHQHGIVHSDLKPANFLIVDGMLKLIDFGIANQMQPDTTSVVKDSQVGTVNYMPPEAIKDMSSSRENGKSKSKISPKSDVWSLGCILYYMTYGKTPFQQIINQISKLHAIIDPNHEIEFPDIPEKDLQDVLKCCLKRDPKQRISIPELLAHPYVQIQTHPVNQMAKGTTEEMKYVLGQLVGLNSPNSILKAAKTLYEHYSGGESHNSSSSKTFEKKRGKK

SEQ ID NO: 5304 - protein, 318 aa, Homo Sapiens
MAAQGCAASRLLQLLLQLLLLLLLLAAGGARARWRAEGTSAHLRDIFLGRCAEYRALLSPEQRNKNCTAIWEAFKVALDKDPCSVLPSDYDLFINLSRHSIPRDKSLFWENSHLLVNSFADNTRRFMPLSDVLYGRVADFLSWCRQKNDSGLDYQSCPTSEDCENNPVDSFWKRASIQYSKDSSGVIHVMLNGSEPTGAYPIKGFFADYEIPNLQKEKITRIEIWVMHEIGGPNVESCGEGSMKVLEKRLKDMGFQYSCINDYRPVKLLQCVDHSTHPDCALKSAAAATQRKAPSLYTEQRAGLIIPLFLVLASRTQL

SEQ ID NO: 5305 - protein, 58 aa, Homo Sapiens
MVPSAGQLALFALGIVLAACQALENSTSPLSADPPVAAAVVSHFNDCPDSHTQFCFHG

SEQ ID NO: 5306 - protein, 375 aa, Homo Sapiens
MKVWLLLGLLLVHEALEDVTGQHLPKNKRPKEPGENRIKPTNKKVKPKIPKMKDRDSANSAPKTQSIMMQVLDKGRFQKPAATLSLLAGQTVELRCKGSRIGWSYPAYLDTFKDSRLSVKQNERYGQLTLVNSTSADTGEFSCWVQLCSGYICRKDEAKTGSTYIFFTEKGELFVPSPSYFDVVYLNPDRQAVVPCRVTVLSAKVTLHREFPAKEIPANGTDIVYDMKRGFVYLQPHSEHQGVVYCRAEAGGRSQISVKYQLLYVAVPSGPPSTTILASSNKVKSGDDISVLCTVLGEPDVEVEFTWIFPGQKDERPVTIQDTWRLIHRGLGHTTRISQSVITVEDFETIDAGYYICTAQNLQGQTTVATTVEFS

SEQ ID NO: 5307 - protein, 375 aa, Homo Sapiens [sequence omitted]

SEQ ID NO: 5308 - protein, 1281 aa, Homo Sapiens
MAEGVNEPCFPGDCGIFVTKVDKGSIADGRLRVNDWLLRINDVDLINKDKKQAIKALLNGEGAINMVVRRRKSLGGKVVTPLHINLSGQKDSGISLENGVYAAAVLPGSPAAKEGSLAVGDRIVAINGIALDNKSLNECESLLRSCQDSLTLSLLKVFPQSSSWSGQNIFENIKDSDKMLSFRAHGPEVQAHNKRNLIQHNNSTQTDIFYTDRLEDRKEPGPPGGSSSFLHKPFPGGPLQVCPQACPSASERSLSSFRSDASGDRGFGLVDVRGRRPLLPFETEVGPCGVGEASLDKADSEGSNSGGTWPKAMLSSTAVPEKLSVYKKPKQRKSIFDPNTFKRPQTPPKIDYLLPGPGPAHSPQPSKRAGPLTPPKPPRRSDSIKFQHRLETSSESEATLVGSSPSTSPPSALPPDVDPGEPMHASPPRKARVRIASSYYPEGDGDSSHLPAKKSCDEDLTSQKVDELGQKRRRPKSAPSFRPKLAPVVIPAQFLEEQKCVPASGELSPELQEWAPYSPGHSSRHSNPPLYPSRPSVGTVPRSLTPSTTVSSILRNPIYTVRSHRVGPCSSPPAARDAGPQGLHPSVQHQGRLSLDLSHRTCSDYSEMRATHGSNSLPSSARLGSSSNLQFKAERIKIPSTPRYPRSVVGSERGSVSHSECSTPPQSPLNIDTLSSCSQSQTSASTLPRIAVNPASLGERRKDRPYVEEPRHVKVQKGSEPLGISIVSGEKGGIYVSKVTVGSIAHQAGLEYGDQLLEFNGINLRSATEQQARLIIGQQCDTITILAQYNPHVHQLSSHSRSSSHLDPAGTHSTLQGSGTTTPEHPSVIDPLMEQDEGPSTPPAKQSSSRIAGDANKKTLEPRVVFIKKSQLELGVHLCGGNLHGVFVAEVEDDSPAKGPDGLVPGDLILEYGSLDVRNKTVEEVYVEMLKPRDGVRLKVQYRPEEFTKAKGLPGDSFYIRALYDRLADVEQELSFKKDDILYVDDTLPQGTFGSWMAWQLDENAQKIQRGQIPSKYVMDQEFSRRLSMSEVKDDNSATKTLSAAARRSFFRRKHKHKRSGSKDGKDLLALDAFSSDSIPLFEDSVSLAYQRVQKVDCTALRPVLILGPLLDVVKEMLVNEAPGKFCRCPLEVMKASQQAIERGVKDCLFVDYKRRSGHFDVTTVASIKEITEKNRHCLLDIAPHAIERLHHMHIYPIVIFIHYKSAKHIKEQRDPIYLRDKVTQRHSKEQFEAAQKLEQEYSRYFTGVIQGGALSSICTQILAMVNQEQNKVLWIPACPL

SEQ ID NO: 5309 - protein, 969 aa, Homo Sapiens
MPPRAPPAPGPRPPPRAAAATDTAAGAGGAGGAGGAGGPGFRPLAPRPWRWLLLLALPAACSAPPPRPVYTNHWAVQVLGGPAEADRVAAAHGYLNLGQIGNLEDYYHFYHSKTFKRSTLSSRGPHTFLRMDPQVKWLQQQEVKRRVKRQVRSDPQALYFNDPIWSNMWYLHCGDKNSRCRSEMNVQAAWKRGYTGKNVVVTILDDGIERNHPDLAPNYDSYASYDVNGNDYDPSPRYDASNENKHGTRCAGEVAASANNSYCIVGIAYNAKIGGIRMLDGDVTDVVEAKSLGIRPNYIDIYSASWGPDDDGKTVDGPGRLAKQAFEYGIKKGRQGLGSIFVWASGNGGREGDYCSCDGYTNSIYTISVSSATENGYKPWYLEECASTLATTYSSGAFYERKIVTTDLRQRCTDGHTGTSVSAPMVAGIIALALEANSQLTWRDVQHLLVKTSRPAHLKASDWKVNGAGHKVSHFYGFGLVDAEALVVEAKKWTAVPSQHMCVAASDKRPRSIPLVQVLRTTALTSACAEHSDQRVVYLEHVVVRTSISHPRRGDLQIYLVSPSGTKSQLLAKRLLDLSNEGFTNWEFMTVHCWGEKAEGQWTLEIQDLPSQVRNPEKQGKLKEWSLILYGTAEHPYHIFSAHQSRSRMLELSAPELEPPKAALSPSQVEVPEDEEDYTAQSTPGSANILQTSVCHPECGDKGCDGPNADQCLNCVHFSLGSVKTSRKCVSVCPLGYFGDTAARRCRRCHKGCETCSSRAATQCLSCRRGFYHHQEMNTCVTLCPAGFYADESQKNCLKCHPSCKKCVDEPEKCTVCKEGFSLARGSCIPDCEPGTYFDSELIRCGECHHTCGTCVGPGREECIHCAKNFHFHDWKCVPACGEGFYPEEMPGLPHKVCRRCDENCLSCAGSSRNCSRCKTGFTQLGTSCITNHTCSNADETFCEMVKSNRLCERKLFIQFCCRTCLLAG

SEQ ID NO: 5310 - protein, 699 aa, Homo Sapiens
GIESDWQGLLVGEEKRSKPIKAYSTENYSLESQKKRKKSRGQTSAANGLRAESLDDQMLSRESSSQAPYKSVTSLCAPEYENIRHYEEIPEYENLPFIMAIRKTQELEWQNSSSMEDADANVYEVEEPYEAPDGQLQLGPRHQHSSSGASQEEQNDLGLGDLPSDEEEIINSSDEDDVSSESSKGEPDPLEDKQDEDNGMKSKVHHIAKEIMSSEKVFVDVLKLLHIDFRDAVAHASRQLGKPVIEDRILNQILYYLPQLYELNRDLLKELEERMLHWTEQQRIADIFVKKGPYLKMYSTYIKEFDKNIALLDEQCKKNPGFAAVVREFEMSPCCANLALKHYLLKPVQRIPQYRLLLTDYLKNLIEDAGDYRDTQDALAVVIEVANHANDTMKQGDNFQKLMQIQYSLNGHHEIVQPGRVFLKEGILMKLSRKVMQPRMFFLFNDALLYTTPVQSGMYKLNNMLSLAGMKVRKPTQEAYQNELKIESVERSFILSASSATERDEWLEAISRAIEEYAKKRITFCPSRSLDEADSENKEEVSPLGSKAPIWIPDTRATMCMICTSEFTLTWRRHHCRACGKIVCQACSSNKYGLDYLKNQPARVCEHCFQELQKLDHQHSPRIGSPGNHKSPSSALSSVLHSIPSGRKQKKIPAALKEVSANTEDSSMSGYLYRSKGNKKPWKHFWFVIKNKVLYTCCK

SEQ ID NO: 5311 - protein, 687 aa, Homo Sapiens
HIEHVVLNQKNMTLSNRCQVFDRFQDTVSQHVVKVDFLNRIHKKHPPNRRVLQSVKRRSLKVPDAIKSQYQFPPPLIAPAAIRDGELICNGIPEESQMHLLNSEHLATQAEQQEWLCSVVALQCSILKHLSAKQMPSHWDSEQTEKADIKPVIVTDSSVTTSLQTADKTPTPSHYPLSCPSGISTQNSLSCSPPHQSPALEDIGCSSCAEKSKKTPCGTANGPVNTEVKANGPHLYSSPTDSTDPRRLPGANTPLPGLSHRQGWPRPLTPPAAGGLQNHTVGIIVKTENATGPSSCPQRSLVPVPSLPPSIPSSCASIENTSTLQRKTVQSQIGPPLTDSRPLGSPPNATRVLTPPQAAGDGILATTANQRFSSPAPSSDGKVSPGTLSIGSALTVPSFPANSTAMVDLTNSLRAFMDVNGEIEINMLDEKLIKFLALQRIHQLFPSRVQPSPGSVGTHQLASGGHHIEVQRKEVQARAVFYPLLGLGGAVNMCYRTLYIGTGADMDVCLTNYGHCNYVSGKHACIFYDENTKHYELLNYSEHGTTVDNVLYSCDFSEKTPPTPPSSIVAKVQSVIRRRRHQKQDEEPSEEAAMMSSQAQGPQRRPCNCKASSSSLIGGSGAGWEGTALLHHGSYIKLGCLQFVFSITEFATKQPKGDASLLQDGVLAEKLSLKPHQGPVLRSNSVP

SEQ ID NO: 5312 - protein, 615 aa, Homo Sapiens
MKALRLSASALFCLLLINGLGAAPPGRPEAQPPPLSSEHKEPVAGDAVPGPKDGSAPEVRGARNSEPQDEGELFQGVDPRALAAVLLQALDRPASPPAPSGSQQGPEEEAAEALLTETVRSQTHSLPAPESPEPAAPPRPQTPENGPEASDPSEELEALASLLQELRDFSPSSAKRQQETAAAETETRTHTLTRVNLESPGPERVWRASWGEFQARVPERAPLPPPAPSQFQARMPDSGPLPETHKFGEGVSSPKTHLGEALAPLSKAYQGVAAPFPKARRPESALLGGSEAGERLLQQGLAQVEAGRRQAEATRQAAAQEERLADLASDLLLQYLLQGGARQRGLGGRGLQEAAEERESAREEEEAEQERRGGEERVGEEDEEAAEAEAEAEEAERARQNALLFAEEEDGEAGAEDKRSQEETPGHRRKEAEGTEEGGEEEDDEEMDPQTIDSLIELSTKLHLPADDVVSIIEEVEEKRKRKKNAPPEPVPPPRAAPAPTHVRSPQPPPPAPAPARDELPDWNEVLPPWDREEDEVYPPGPYHPFPNYIRPRTLQPPSALRRRHYHHALPPSRHYPGREAQARRAQEEAEAEERRLQEQEELENYIEHVLLRRP

SEQ ID NO: 5313 - protein, 261 aa, Homo Sapiens
MAAACRSVKGLVAVITGGASGLGLATAERLVGQGASAVLLDLPNSGGEAQAKKLGNNCVFAPADVTSEKDVQTALALAKGKFGRVDVAVNCAGIAVASKTYNLKKGQTHTLEDFQRVLDVNLMGTFNVIRLVAGEMGQNEPDQGGQRGVIINTASVAAFEGQVGQAAYSASKGGIVGMTLPIARDLAPIGIRVMTIAPGLFGTPLLTSLPEKVCNFLASQVPFPSRLGDPAEYAHLVQAIIENPFLNGEVIRLDGAIRMQP

SEQ ID NO: 5314 - protein, 496 aa, Homo Sapiens [sequence omitted]

SEQ ID NO: 5315 - protein, 751 aa, Homo Sapiens
MAFRTICVLVGVFICSICVKGSSQPQARVYLTFDELRETKTSEYFSLSHHPLDYRILLMDEDQDRIYVGSKDHILSLNINNISQEALSVFWPASTIKVEECKMAGKDPTHGCGNFVRVIQTFNRTHLYVCGSGAFSPVCTYLNRGRRSEDQVFMIDSKCESGKGRCSFNPNVNTVSVMINEELFSGMYIDFMGTDAAIFRSLTKRNAVRTDQHNSKWLSEPMFVDAHVIPDGTDPNDAKVYFFFKEKLTDNNRSTKQIHSMIARICPNDTGGLRSLVNKWTTFLKARLVCSVTDEDGPETHFDELEDVFLLETDNPRTTLVYGIFTTSSSVFKGSAVCVYHLSDIQTVFNGPFAHKEGPNHQLISYQGRIPYPRPGTCPGGAFTPNMRTTKEFPDDVVTFIRNHPLMYNSIYPIHKRPLIVRIGTDYKYTKIAVDRVNAADGRYHVLFLGTDRGTVQKVVVLPTNNSVSGELILEELEVFKNHAPITTMKISSKKQQLYVSSNEGVSQVSLHRCHIYGTACADCCLARDPYCAWDGHSCSRFYPTGKRRSRRQDVRHGNPLTQCRGFNLKAYRNAAEIVQYGVKNNTTFLECAPKSPQASIKWLLQKDKDRRKEVKLNERIIATSQGLLIRSVQGSDQGLYHCIATENSFKQTIAKINFKVLDSEMVAVVTDKWSPWTWASSVRALPFHPKDIMGAFSHSEMQMINQYCKDTRQQHQQGDESQKMRGDYGKLKALINSRKSRNRRNQLPES

SEQ ID NO: 5316 - protein, 522 aa, Homo Sapiens
MSSRPLESPPPYRPDEFKPNHYAPSNDIYGGEMHVRPMLSQPAYSFYPEDEILHFYKWTSPPGVIRILSMLIIVMCIAIFACVASTLAWDRGYGTSLLGGSVGYPYGGSGFGSYGSGYGYGYGYGYGYGGYTDPRAAKGFMLAMAAFCFIAALVIFVTSVIRSEMSRTRRYYLSVIIVSAILGIMVFIATIVYIMGVNPTAQSSGSLYGSQIYALCNQFYTPAATGLYVDQYLYHYCVVDPQEAIAIVLGFMIIVAFALIIFFAVKTRRKMDRYDKSNILWDKEHIYDEQPPNVEEWVKNVSAGTQDVPSPPSDYVERVDSPMAYSSNGKVNDKRFYPESSYKSTPVPEVVQELPLTSPVDDFRQPRYSSGGNFETPSKRAPAKGRAGRSKRTEQDHYETDYTTGGESCDELEEDWIREYPPITSDQQRQLYKRNFDTGLQEYKSLQSELDEINKELSRLDKELDDYREESEEYMAAADEYNRLKQVKGSADYKSKKNHCKQLKSKLSHIKKMVGDYDRQKT

SEQ ID NO: 5317 - protein, 480 aa, Homo Sapiens
MAVARAALGPLVTGLYDVQAFKFGDFVLKSGLSSPIYIDLRGIVSRPRLLSQVADILFQTAQNAGISFDTVCGVPYTALPLATVICSTNQIPMLIRRKETKDYGTKRLVEGTINPGETCLIIEDVVTSGSSVLETVEVLQKEGLKVTDAIVLLDREQGGKDKLQAHGIRLHSVCTLSKMLEILEQQKKVDAETVGRVKRFIQENVFVAANHNGSPLSIKEAPKELSFGARAELPRIHPVASKLLRLMQKKETNLCLSADVSLARELLQLADALGPSICMLKTHVDILNDFTLDVMKELITLAKCHEFLIFEDRKFADIGNTVKKQYEGGIFKIASWADLVNAHVVPGSGVVKGLQEVGLPLHRGCLLIAEMSSTGSLATGDYTRAAVRMAEEHSEFVVGFISGSRVSMKPEFLHLTPGVQLEAGGDNLGQQYNSPQEVIGKRGSDIIIVGRGIISAADRLEAAEMYRKAAWEAYLSRLGV

SEQ ID NO: 5318 - protein, 4650 aa, Homo Sapiens
PNYIVEKRESGTTAWQLVNSSVKRTQIKVTHLTKYMEYSFRVSSENRFGVSKPLESAPIIAEHPFVPPSAPTRPEVYHVSANAMSIRWEEPYHDGGSKIIGYWVEKKERNTILWVKENKVPCLECNYKVTGLVEGLEYQFRTYALNAAGVSKASEASRPIMAQNPVDAPGRPGVTDVQRSTVSLIWSAPAYDGGSKVVGYIIERKPVSEVGDGRWLKCNYTIVSDNFFTVTALSEGDTYEFRVLAKNAAGVISKGSESTGPVTCRDEYAPPKAELDARLHGDLVTIRAGSDLVLDAAVGGKPEPKIIWTKGDKELDLCEKVSLQYTGKRATAVIKFCDRSDSGKYTLTVKNASGTKAVSVMVKVLDSPGPCGKLTVSRVTQEKCTLAWSLPQEDGGAEITHYIVERRETSRLNWVIVEGECPTLSYVVTRLIKNNEYIFRVRAVNKYGPGVPVESEPIVARNSFTIPSPPGIPEEVGTGKEHIIIQWTKPESDGGNEISNYLVDKREKESLRWTRVNKDYVVYDTRLKVTSLMEGCDYQFRVTAVNAAGNSEPSERSNFISCREPSYTPGPPSAPRVVDTTKHSISLAWTKPMYDGGTDIVGYVLEMQEKDTDQWYRVHTNATIRNTEFTVPDLKMGQKYSFRVAAVNVKGMSEYSESIAEIEPVERIEIPDLELADDLKKTVTIRAGASLRLMVSVSGRPPPVITWSKQGIDLASRAIIDTTESYSLLIVDKVNRYDAGKYTIEAENQSGKKSATVLVKVYDTPGPCPSVKVKEVSRDSVTITWEIPTIDGGAPINNYIVEKREAAMRAFKTVTTKCSKTLYRISGLVEGTMHYFRVLPENIYGIGEPCETSDAVLVSEVPLVPAKLEVVDVTKSTVTLAWEKPLYDGGSRLTGYVLEACKAGTERWMKVVTLKPTVLEHTVTSLNEGEQYLFRIRAQNEKGVSEPRETVTAVTVQDLRVLPTIDLSTMPQKTIHVPAGRPVELVIPIAGRPPPAASWFFAGSKLRESERVTVETHTKVAKLTIRETTIRDTGEYTLELKNVTGTTLETIKVIILDKPGPPTGPIKIDEIDATSITISWEPPELDGGAPLSGYVVEQRDAHRPGWLPVSESVTRSTFKFTRLTEGNEYVFRVAATNRFGIGSYLQSEVIECRSSIRIPGPPETLQIFDVSRDGMTLTWYPPEDDGGSQVTGYIVERKEVRADRWVRVNKVPVTMTRYRSTGLTEGLEYEHRVTAINARGSGKPSRPSKPIVAMDPIAPPGKPQNPRVTDTTRTSVSLAWSVPEDEGGSKVTGYLIEMQKVDQHEWTKCNTTPTKIREYTLTHLPQGAEYRFRVLACNAGGPGEPAEVPGTVKVTEMLEYPDYELDERYQEGIFVRQGGVIRLTIPIKGKPFPICKWTKEGQDISKRAMIATSETHTELVIKEADRGDSGTYDLVLENKCGKKAVYIKVRVIGSPNSPEGPLEYDDIQVRSVRVSWRPPADDGGADILGYILERREVPKAAWYTIDSRVRGTSLVVKGLKENVEYHFRVSAENQFGISKPLKSEEPVTPKTPLNPPEPPSNPPEVLDVTKSSVSLSWSRPKDDGGSRVTGYYIERKETSTDKVVRHNKTQITTTMYTVTGLVPDAEYQFRIIAQNDVGLSETSPASEPVVCKDPFDKPSQPGELEILSISKDSVTLQWEKPECDGGKEILGYWVEYRQSGDSAWKKSNKERIKDKQFTIGGLLEATEYEFRVFAENETGLSRPRRTAMSIKTKLTSGEAPGIRKEMKDVTTKLGEAAQLSCQIVGRPLPDIKWYRFGKELIQSRKYKMSSDGRTHTLTVMTEEQEDEGVYTCIATNEVGEVETSSKLLLQATPQFHPGYPLKEKYYGAVGSTLRLHVMYIGRPVPAMTWFHGQKLLQNSENITIENTEHYTHLVMKNVQRKTHAGKYKVQLSNVFGTVDAILDVEIQDKPDKPTGPIVIEALLKNSAVISWKPPADDGGSWITNYVVEKCEAKEGAEWQLVSSAISVTTCRIVNLTENAGYYFRVSAQNTFGISDPLEVSSVVIIKSPFEKPGAPGKPTITAVTKDSCVVAWKPPASDGGAKIRNYYLEKREKKQNKWISVTTEEIRETVFSVKNLIEGLEYEFRVKCENLGGESEWSEISEPITPKSDVPIQAPHFKEELRNLNVRYQSNATLVCKVTGHPKPIVKWYRQGKEIIADGLKYRIQEFKGGYHQLIIASVTDDDATVYQVRATNQGGSVSGTASLEVEVPAKIHLPKTLEGMGAVHALRGEVVSIKIPFSGKPDPVITWQKGQDLIDNNGHYQVIVTRSFTSLVFPNGVERKDAGFYVVCAKNRFGIDQKTVELDVADVPDPPRGVKVSDASRDSVNLTWTEPASDGGSKITNYIVEKCATTAERWLRVGQARETRYTVINLFGKTSYQFRVIAENKFGLSKPSEPSEPTITKEDKTRAMNYDEEVDETREVSMTKASHSSTKELYEKYMIAEDLGRGEFGIVHRCVETSSKKTYMAKFVKVKGTDQVLVKKEISILNIARHRNILHLHESFESMEELVMIFEFISGLDIFERINTSAFELNEREIVSYVHQVCEALQFLHSHNIGHFDIRPENIIYQTRRSSTIKIIEFGQARQLKPGDNFRLLFTAPEYYAPEVHQHDVVSTATDMWSLGTLVYVLLSGINPFLAETNQQIIENIMNAEYTFDEEAFKEISIEAMDFVDRLLVKERKSRMTASEALQHPWLKQKIERVSTKVIRTLKHRRYYHTLIKKDLNMVVSAARISCGGAIRSQKGVSVAKVKVASIEIGPVSGQIMHAVGEEGGHVKYVCKIENYDQSTQVTWYFGVRQLENSEKYEITYEDGVAILYVKDITKLDDGTYRCKVVNDYGEDSSYAELFVKGVREVYDYYCRRTMKKIKRRTDTMRLLERPPEFTLPLYNKTAYVGENVRFGVTITVHPEPHVTWYKSGQKIKPGDNDKKYTFESDKGLYQLTINSVTTDDDAEYTVVARNKYGEDSCKAKLTVTLHPPPTDSTLRPMFKRLLANAECQEGQSVCFEIRVSGIPPPTLKWEKDGQPLSLGPNIEIIHEGLDYYALHIRDTLPEDTGYYRVTATNTAGSTSCQAHLQVERLRYKKQEFKSKEEHERHVQKQIDKTLRMAEILSGTESVPLTQVAKEALREAAVLYKPAVSTKTVKGEFRLEIEEKKEERKLRMPYDVPEPRKYKQTTIEEDQRIKQFVPMSDMKWYKKIRDQYEMPGKLDRVVQKRPKRIRLSRWEQFYVMPLPRITDQYRPKWRIPKLSQDDLEIVRPARRRTPSPDYDFYYRPRRRSLGDISDEELLLPIDDYLAMKRTEEERLRLEEELELGFSASPPSRSPPHFELSSLRYSSPQAHVKVEETRKNFRYSTYHIPTKAEASTSYAELRERHAQAAYRQPKQRQRIMAEREDEELLRPVTTTQHLSEYKSELDFMSKEEKSRKKSRRQREVTEITEIEEEYEISKHAQRESSSSASRLLRRRRSLSPTYIELMRPVSELIRSRPQPAEEYEDDTERRSPTPERTRPRSPSPVSSERSLSRFERSARFDIFSRYESMKAALKTQKTSERKYEVLSQQPFTLDHAPRITLRMRSHRVPCGQNTRFILNVQSKPTAEVKWYHNGVELQESSKIHYTNTSGVLTLEILDCHTDDSGTYRAVCTNYKGERSDYATLDVTGGDYTTYASQRRDEEVPRSVFPELTRTEAYAVPSFKKTSEMEASSSVREVKSQMTETRESLSSYEHSASAEMKSAALEEKSLEEKSTTRKIKTTLAARILTKPRSMTVYEGESARFSCDTDGEPVPTVTWLRKGRVLSTSARHQVTTTKYKSTFEISSVQASDEGNYSVVVENSEGKQEAEFTLTIQKARVTEKAVTSPPRVKSPEPRVKSPEAVKSPKRVKSPEPSHPKAVSPTETKPTPIEKVQHLPVSAPPKITQFLKAEASKEIAKLTCVVESSVLRAKEVTWYKDGKKLKENGHFQFHYSADGTYELKINNLTESDQGEYVCEISGEGGTSKTNLQFMGQAFKSIHEKVSKISETKKSDQKTTESTVTRKTEPKAPEPISSKPVIVTGLQDTTVSSDSVAKFAVKATGEPRPTAIWTKDGKAITQGGKYKLSEDKGGFFLEIHKTDTSDSGLYTCTVKNSAGSVSSSCKLTIKAIKDTEAQKVSTQKTSEITPQKKAVVQEEISQKALRSEEIKMSEAKSQEKLALKEEASKVLISEEVKKSAATSLEKSIVHEEITKTSQASEEVRTHAEIKAFSTQMSINEGQRLVLKANIAGATDVKWVLNGVELTNSEEYRYGVSGSDQTLTIKQASHRDEGILTCISKTKEGIVKCQYDLTLSKELSDAPAFISQPRSQNINEGQNVLFTREISGEPSPEIEWFKNNLPISISSNVSISRSRNVYSLEIRNASVSDSGKYTIKAKNFRGQCSATASLMVLPLVEEPSREVVLRTSGDTSLQGSFSSQSVQMSASKQEASFSSFSSSSASSMTEMKFASMSAQSMSSMQESFVEMSSSSFMGISNMTQLESSTSKMLKAGIRGIPPKIEALPSDISIDEGKVLTVACAFTGEPTPEVTWSCGGRKIHSQEQGRFHIENTDDLTTLIIMDVQKQDGGLYTLSLGNEFGSDSATVNIHIRSI

SEQ ID NO: 5319 - protein, 457 aa, Homo Sapiens [sequence omitted]

SEQ ID NO: 5320 - protein, 1104 aa, Homo Sapiens [sequence omitted]

SEQ ID NO: 5321 - protein, 1017 aa, Homo Sapiens [sequence omitted]

SEQ ID NO: 5322 - protein, 167 aa, Homo Sapiens [sequence omitted]

SEQ ID NO: 5323 - protein, 503 aa, Homo Sapiens
MTLGSPRKGLLMLLMALVTQGDPVKPSRGPLVTCTCESPHCKGPTCRGAWCTVVLVREEGRHPQEHRGCGNLHRELCRGRPTEFVNHYCCDSHLCNHNVSLVLEATQPPSEQPGTDGQLALILGPVLALLALVALGVLGLWHVRRRQEKQRGLHSELGESSLILKASEQGDTMLGDLLDSDCTTGSGSGLPFLVQRTVARQVALVECVGKGRYGEVWRGLWHGESVAVKIFSSRDEQSWFRETEIYNTVLLRHDNILGFIASDMTSRNSSTQLWLITHYHEHGSLYDFLQRQTLEPHLALRLAVSAACGLAHLHVEIFGTQGKPAIAHRDFKSRNVLVKSNLQCCIADLGLAVMHSQGSDYLDIGNNPRVGTKRYMAPEVLDEQIRTDCFESYKWTDIWAFGLVLWEIARRTIVNGIVEDYRPPFYDVVPNDPSFEDMKKVVCVDQQTPTIPNRLAADPVLSGLAQMMRECWYPNPSARLTALRIKKTLQKISNSPEKPKVIQ

SEQ ID NO: 5324 - protein, 574 aa, Homo Sapiens
MGNNFSSIPSLPRGNPSRAPRGHPQNLKDSIGGPFPVTSHRCHHKQKHCPAVLPSGGLPAAPLLFHPHTKGSQILMDLSHKAVKRQASFCNAITFSNRPVLIYEQVRLKITKKQCCWSGALRLGFTSKDPSRIHPDSLPKYACPDLVSQSGFWAKALPEEFANEGNIIAFWVDKKGRVFHRINDSAVMLFFSGVRTADPLWALVDVYGLTRGVQLLDSELVLPDCLRPRSFTALRRPSLRREADDARLSVSLCDLNVPGADGDEAAPAASCPIPQNSLNSQHSRALPAQLDGDLRFHALRAGAHVRILDEQTVARVEHGRDERALVFTSRPVRVAETIFVKVTRSGGARPGALSFGVTTCDPGTLRPADLPFSPEALVDRKEFWAVCRVPGPLHSGDILGLVVNADGELHLSHNGAAAGMQLCVDASQPLWMLFGLHGTITQIRILGSTILAERGIPSLPCSPASTPTSPSALGSGLSDPLLSTCSSGPLGSSAGGTAPNSPVSLPESPVTPGLGQWSDECTICYEHAVDTVIYTCGHMCLCYACGLRLKKALHACCPICRRPIKGIIKTYRSS

SEQ ID NO: 5325 - protein, 1262 aa, Homo Sapiens
MLQQVPENINFPAEEEKILEFWTEFNCFQECLKQSKHKPKFTFYDGPPFATGLPHYGHILAGTIKDIVTRYAHQSGFHVDRRFGWDCHGLPVEYEIDKTLGIRGPEDVAKMGITEYNNQCRAIVMRYSAEWKSTVSRLGRWIDFDNDYKTLYPQFMESVWWVFKQLYDKGLVYRGVKVMPFSTACNTPLSNFESHQNYKDVQDPSVFVTFPLEEDETVSLVAWTTTPWTLPSNLAVCVNPEMQYVKIKDVARGRLLILMEARLSALYKLESDYEILERFPGAYLKGKKYRPLFDYFLKCKENGAFTVLVDNYVKEEEGTGVVHQAPYFGAEDYRVCMDFNIIRKDSLPVCPVDASGCFTTEVTDFAGQYVKDADKSIIRTLKEQGRLLVATTFTHSYPFCWRSDTPLIYKAVPSWFVRVENMVDQLLRNNDLCYWVPELVREKRFGNWLKDARDWTISRNRYWGTPIPLWVSDDFEEVVCIGSVAELEELSGAKISDLHRESVDHLTIPSRCGKGSLHRISEVFDCWFESGSMPYAQVHYPFENKREFEDAFPADFIAEGIDQTRGWFYTLLVLATALFGQPPFKNVIVNGLVLASDGQKMSKRKKNYPDPVSIIQKYGADALRLYLINSPVVRAENLRFKEEGVRDVLKDVLLPWYNAYRFLIQNVLRLQKEEEIEFLYNENTVRESPNITDRWILSFMQSLIGFFETEMAAYRLYTVVPRLVKFVDILTNWYVRMNRRRLKGENGMEDCVMALETLFSVLLSLCRLIAPYTPFLTELMYQNLKVLIDPVSVQDKDTLSIHYLMLPRVREELIDKKTESAVSQMQSVIELGRVIRDRKTIPIKYPLKEIVVIHQDPEALKDIKSLEKYIIEELNVRKVTLSTDKNKYGIRLRAEPDHMVLGKRLKGAFKAVMTSIKQLSSEELEQFQKTGTIVVEGHELHDEDIRLMYTFDQATGGTAQFEAHSDAQALVLLDVTPDQSMVDEGMAREVINRIQKLRKKCNLVPTDEITVYYKAKSEGTYLNSVIESHTEFIFTTIKAPLKPYPVSPSDKVLIQEKTQLKGSELEITLTRGSSLPGPACAYVNLNICANGSEQGGVLLLENPKGDNRLDLLKLKSVVTSIFGVKNTELAVFHDETEIQNQTDLLSLSGKTLCVTAGSAPSLINSSSTLLCQYINLQLLNAKPQECLMGTVGTLLLENPLGQNGLTHQGLLYEAAKVFGLRSRKLKLFLNETQTQEITEDIPVKTLNMKTVYVSVLPTTADF

SEQ ID NO: 5326 - protein, 195 aa, Homo Sapiens
MDCEVNNGSSLRDECITNLLVFGFLQSCSDNSFRRELDALGHELPVLAPQWEGYDELQTDGNRSSHSRLGRIEADSESQEDIIRNIARHLAQVGDSMDRSIPPGLVNGLALQLRNTSRSEEDRNRDLATALEQLLQAYPRDMEKEKTMLVLALLLAKKVASHTPSLLRDVFHTTVNFINQNLRTYVRSLARNGMD

SEQ ID NO: 5327 - protein, 318 aa, Homo Sapiens
MWLPLLLGALLWAVLWLLRDRQSLPASNAFVFITGCDSGFGRLLALQLDQRGFRVLASCLTPSGAEDLQRVASSRLHTTLLDITDPQSVQQAAKWVEMHVKEAGLFGLVNNAGVAGIIGPTPWLTRDDFQRVLNVNTMGPIGVTLALLPLLQQARGRVINITSVLGRLAANGGGYCVSKFGLEAFSDSLRRDVAHFGIRVSIVEPGFFRTPVTNLESLEKTLQACWARLPPATQAHYGGAFLTKYLKMQQRIMNLICDPDLTKVSRCLEHALTARHPRTRYSPGWDAKLLWLPASYLPASLVDAVLTWVLPKPAQAVY

SEQ ID NO: 5328 - protein, 686 aa, Homo Sapiens
MEVVTFGDVAVHFSREEWQCLDPGQRALYREVMLENHSSVAGLAGFLVFKPELISRLEQGEEPWVLDLQGAEGTEAPRTSKTDSTIRTENEQACEDMDILKSESYGTVVRISPQDFPQNPGFGDVSDSEVWLDSHLGSPGLKVTGFTFQNNCLNEETVVPKTFTKDAPQGCKELGSSGLDCQPLESQGESAEGMSQRCEECGKGIRATSDIALHWEINTQKISRCQECQKKLSDCLQGKHTNNCHGEKPYECAECGKVFRLCSQLNQHQRIHTGEKPFKCTECGKAFRLSSKLIQHQRIHTGEKPYRCEECGKAFGQSSSLIHHQRIHTGERPYGCRECGKAFSQQSQLVRHQRTHTGERPYPCKECGKAFSQSSTLAQHQRMHTGEKAQILKASDSPSLVAHQRIHAVEKPFKCDECGKAFRWISRLSQHQLIHTGEKPYKCNKCTKAFGCSSRLIRHQRTHTGEKPFKCDECGKGFVQGSHLIQHQRIHTGEKPYVCNDCGKAFSQSSSLIYHQRIHKGEKPYECLQCGKAFSMSTQLTIHQRVHTGERPYKCNECGKAFSQNSTLFQHQIIHAGVKPYECSECGKAFSRSSYLIEHQRIHTRAQWFYEYGNALEGSTFVSRKKVNTIKKLHQCEDCEKIFRWRSHLIIHQRIHTGEKPYKCNDCGKAFNRSSRLTQHQKIHMG

SEQ ID NO: 5329 - protein, 805 aa, Homo Sapiens
MAFSPWQILSPVQWAKWTWSAVRGGAAGEDEAGGPEGDPEEEDSQAETKSLSFSSDSEGNFETPEAETPIRSPFKESCDPSLGLAGPGAKSQESQEADEQLVAEVVEKCSSKTCSKPSENEVPQQAIDSHSVKNFREEPEHDFSKISIVRPFSIETKDSTDISAVLGTKAAHGCVTAVSGKALPSSPPDALQDEAMTEGSMGVTLEASAEADLKAGNSCPELVPSRRSKLRKPKPVPLRKKAIGGEFSDTNAAVEGTPLPKASYHFSPEELDENTSPLLGDARFQKSPPDIKETPGTLSSDTNDSGVELGEESRSSPLKLEFDFTEDTGNIEARKALPRKLGRKLGSTLTPKIQKDGISKSAGLEQPTDPVARDGPLSQTSSKPDPSQWESPSFNPFGSHSVLQNSPPLSSEGSYHFDPDNFDESMDPFKPTTTLTSSDFCSPTGNHVNEILESPKKAKSRLITSGCKVKKHETQSLALDACSRDEGAVISQISDISNRDGHATDEEKLASTSCGQKSAGAEVKGEPEEDLEYFECSNVPVSTINHAFSSSEAGIEKETCQKMEEDGSTVLGLLESSAEKAPVSVSCGGESPLDGICLSESDKTAVLTLIREEIITKEIEANEWKKKYEETRQEVLEMRKIVAEYEKTIAQMIEDEQRTSMTSQKSFQQLTMEKEQALADLNSVERSLSDLFRRYENLKGVLEGFKKNEEALKKCAQDYLARVKQEEQRYQALKIHAEEKLDKANEEIAQVRTKAKAESAALHAGLRKEQMKVESLERALQQKNQEIEELTKICDELIAKLGKTD

SEQ ID NO: 5330 - protein, 767 aa, Homo Sapiens
MATYLEFIQQNEERDGVRFSWNVWPSSRLEATRMVVPLACLLTPLKERPDLPPVQYEPVLCSRPTCKAVLNPLCQVDYRAKLWACNFCFQRNQFPPAYGGISEVNQPAELMPQFSTIEYVIQRGAQSPLIFLYVVDTCLEEDDLQALKESLQMSLSLLPPDALVGLITFGRMVQVHELSCEGISKSYVFRGTKDLTAKQIQDMLGLTKPAMPMQQARPAQPQEHPFASSRFLQPVHKIDMNLTDLLGELQRDPWPVTQGKRPLRSTGVALSIAVGLLEGTFPNTGARIMLFTGGPPTQGPGMVVGDELKIPIRSWHDIEKDNARFMKKATKHYEMLANRTAANGHCIDIYACALDQTGLLEMKCCANLTGGYMVMGDSFNTSLFKQTFQRIFTKDFNGDFRMAFGATLDVKTSRELKIAGAIGPCVSLNVKGPCVSENELGVGGTSQWKICGLDPTSTLGIYFEVVNQHNTPIPQGGRGAIQFVTHYQHSSTQRRIRVTTIARNWADVQSQLRHIEAAFDQEAAAVLMARLGVFRAESEEGPDVLRWLDRQLIRLCQKFGQYNKEDPTSFRLSDSFSLYPQFMFHLRRSPFLQVFNNSPDESSYYRHHFARQDLTQSLIMIQPILYSYSFHGPPEPVLLDSSSILADRILLMDTFFQIVIYLGETIAQWRKAGYQDMPEYENFKHLLQAPLDDAQEILQARFPMPRYINTEHGGSQARFLLSKVNPSQTHNNLYAWGQETGAPILTDDVSLQVFMDHLKKLAVSSAC

SEQ ID NO: 5331 - protein, 410 aa, Homo Sapiens
MEAENAGSYSLQQAQAFYTFPFQQLMAEAPNMAVVNEQQMPEEVPAPAPAQEPVQEAPKGRKRKPRTTEPKQPVEPKKPVESKKSGKSAKPKEKQEKITDTFKVKRKVDRFNGVSEAELLTKTLPDILTFNLDIVIIGINPGLMAAYKGHHYPGPGNHFWKCLFMSGLSEVQLNHMDDHTLPGKYGIGFTNMVERTTPGSKDLSSKEFREGGRILVQKLQKYQPRIAVFNGKCIYEIFSKEVFGVKVKNLEFGLQPHKIPDTETLCYVMPSSSARCAQFPRAQDKVHYYIKLKDLRDQLKGIERNMDVQEVQYTFDLQLAQEDAKKMAVKEEKYDPGYEAAYGGAYGENPCSSEPCGFSSNGLIESVELRGESAFSGIPNGQWMTQSFTDQIPSFSNHCGTQEQEEESHA

SEQ ID NO: 5332 - protein, 1820 aa, Homo Sapiens
GSGLTEVCRAGSKHSRPIPLPDQRPSANPGGIGEEAPCRHPREALDGPVFSRNPEGSRTLSPSRGKESRTLPCRQPCSSQPVATHAYSSHSSTLLCFRDGDLGKEPFKAAPHTIHPPCVVPSRAYEMDETGEISRGPDVHLTHGLEPKDVNREFRLTESSTCEPSTVAAVLSRAQGCRSPSAPDVRTGSFSHSATDGSVGLIGVPEKKVAEKQASTELEAASFPAGMYSEPLRQFRDSSVGDQNAQVCQTNPEPPATTQGPHTLDLSEGSAESKLVVEPQHECLENTTRCFLEKPQFSTELRDHNRLDSQAKFVARLKHTCSPQEDSPWQEEEQHRDQASGGGEGFAQGVNPLPDEDGLDGCQILDAGREEVAVAKPPVSKILSQGFKDPATVSLRQNETPQPAAQRSGHLYTGREQPAPNHRGSLPVTTIFSGPKHSRSSPTPQFSVVGSSRSLQELNLSVEPPSPTDEDTQGPNRLWNPHLRGYSSGKSVARTSLQAEDSDQKASSRLDDGTTDHRHLKPATPPYPMPSTLSHMPTPDFTTSWMSGTLEQAQQGKREKLGVQVRPENWCSQMDKGMLHFGSSDISPYALPWRPEEPARISWKQYMSGSAVDVSCSQKPQGLTLSNVARCSSMDNGLEDQNSPFHSHLSTYANICDLSTTHSSTENAQGSNEAWEVFRGSSSIALGDPHIPTSPEGVAPTSGHDRRPQFRGPSGEADCLRSKPPLAKGSAAGPVDEIMLLYPSEAGCPVGQTRTNTFEQGTQTLGSRRHWSSTDISFAQPEASAVSAFDLASWTSMHNLSLHLSQLLHSTSELLGSLSQPDVARREQNTKRDIPDKAPQALMMDGSTQTTVDEGSQTDLTLPTLCLQTSEAEPQGANVILEGLGSDTSTVSQEEGDVPGVPQKREAEETAQKMAQLLYLQEESTPYKPQSPSIPSSHLRFQKAPVGQHLPSVSPSVSDAFLPPSSQPEESYCLVVSSPSPSSPHSPGLFPSTSEYPGDSRVQKKLGPTSALFVDRASSPILTLSASTQEPGLSPGSLTLSAPSTHPVEGHQKLDSSPDPVDAPRTPMDNYSQTTDELGGSQRGRSSLQRSNGRSFLELHSPHSPQQSPKLQFSFLGQHPQQLQPRTTIGVQSRLLPPPLRHRSQRLGNSFVPEKVASPEHCPLSGREPSQWQSRTENGGESSASPGEPQRTLDRPSSWGGLQHLSPCPVSELTDTAGLRGSALGLPQACQPEELLCFSCQMCMAPEHQHHSLRDLPVHNKFSNWCGVQKGSPGGLDMTEEELGASGDLSSEKQEQSPPQPPNDHSQDSEWSKREQIPLQVGAQNLSLSVELTEAKLHHGFGEADALLQVLQSGTGEALAADEPVTSTWKELYARQKKAIETLRRERAERLGNFCRTRSLSPQKQLSLLPNKDLFIWDLDLPSRRREYLQQLRKDVVETTRSPESVSRSAHTPSDIELMLQDYQQAHEEAKVEIARARDQLRERTEQEKLRIHQKIISQLLKEEDKLHTLANSSSLCTSSNGSLSSGMTSGYNSSPALSGQLQFPENMGHTNLPDSRDVWIGDERGGHSAVRKNSAYSHRASLGSCCCSPSSLSSLGTCFSSSYQDLAKHVVDTSMADVMAACSDNLHNLFSCQATAGWNYQGEEQAVQLYYKVFSPTRHGFLGAGVVSQPLSRVWAAVSDPTVWPLYYKPIQTARLHQRVTNSISLVYLVCNTTLCALKQPRDFCCVCVEAKEGHLSVMAAQSVYDTSMPRPSRKMVHGEILPSAWILQPITVEGKEVTRVIYLAQVELGAPGFPPQLLSSFIKRQPLVIARLASFLGR

SEQ ID NO: 5333 - protein, 372 aa, Homo Sapiens
MHFSTVTRDMEAFTASSLSSLGAAGGFPGAASPGADPYGPREPPPPPPRYDPCAAAAPGAPGPPPPPHAYPFAPAAGAATSAAAEPEGPGASCAAAAKAPVKKNAKVAGVSVQLEMKALWDEFNQLGTEMIVTKAGRRMFPTFQVKLFGMDPMADYMLLMDFVPVDDKRYRYAFHSSSWLVAGKADPATPGRVHYHPDSPAKGAQWMKQIVSFDKLKLTNNLLDDNGHIILNSMHRYQPRFHVVYVDPRKDSEKYAEENFKTFVFEETRFTAVTAYQNHRITQLKIASNPFAKGFRDCDPEDWPRNHRPGALPLMSAFARSRNPVASPTQPSGTEKGLVTEGSGLQPGLLDVLLKPPSKKSESLRPPHCKDT

SEQ ID NO: 5334 - protein, 258 aa, Homo Sapiens
MAETEERSLDNFFAKRDKKKKKERSNRAASAAGAAGSAGGSSGAAGAAGGGAGAGTRPGDGGTASAGAAGPGAATKAVTKDEDEWKELEQKEVDYSGLRVQAMQISSEKEEDDNEKRQDPGDNWEEGGGGGGGMEKSSGPWNKTAPVQAPPAPVIVTETPEPAMTSGVYRPPGARLTTTRKTPQGPPEIYSDTQFPSLQSTAKHVESRKDKEMEKSFEVVRHKNRGRDEVSKNQALKLQLDNQYAVLENQKSSHSQYN

SEQ ID NO: 5335 - protein, 335 aa, Homo Sapiens
VVSGEEVAPEVALAVALRRSKEPATEFCCLGGAAPHRSLHLAAAMAKGRVAERSQLGAHHTTPVGDGAAGTRGLAAPGSRDHQKEKSWVEAGSARMSLLILVSIFLSAAFVMFLVYKNFPQLSEEERVNMKVPRDMDDAKALGKVLSKYKDTFYVQVLVAYFATYIFLQTFAIPGSIFLSILSGFLYPFPLALFLVCLCSGLGASFCYMLSYLVGRPVVYKYLTEKAVKWSQQVERHREHLINYIIFLRITPFLPNWFINITSPVINVPLKVFFIGTFLGVAPPSFVAIKAGTTLYQLTTAGEAVSWNSIFILMILAVLSILPAIFQKKLKQKFE

SEQ ID NO: 5336 - protein, 478 aa, Homo Sapiens
MLLWVQQALLALLLPTLLAQGEARRSRNTTRPALLRLSDYLLTNYRKGVRPVRDWRKPTTVSIDVIVYAILNVDEKNQVLTTYIWYRQYWTDEFLQWNPEDFDNITKLSIPTDSIWVPDILINEFVDVGKSPNIPYVYIRHQGEVQNYKPLQVVTACSLDIYNFPFDVQNCSLTFTSWLHTIQDINISLWRLPEKVKSDRSVFMNQGEWELLGVLPYFREFSMESSNYYAEMKFYVVIRRRPLFYVVSLLLPSIFLMVMDIVGFYLPPNSGERVSFKITLLLGYSVFLIIVSDTLPATAIGTPLIGVYFVVCMALLVISLAETIFIVRLVHKQDLQQPVPAWLRHLVLERIAWLLCLREQSTSQRPPATSQATKTDDCSAMGNHCSHMGGPQDFEKSPRDRCSPPPPPREASLAVCGLLQELSSIRQFLEKRDEIREVARDWLRVGSVLDKLLFHIYLLAVLAYSITLVMLWSIWQYA

SEQ ID NO: 5337 - protein, 248 aa, Homo Sapiens
MWLCPLALNLILMAASGAVCEVKDVCVGSPGIPGTPGSHGLPGRDGRDGLKGDPGPPGPMGPPGEMPCPPGNDGLPGAPGIPGECGEKGEPGERGPPGLPAHLDEELQATLHDFRHQILQTRGALSLQGSIMTVGEKVFSSNGQSITFDAIQEACARAGGRIAVPRNPEENEAIASFVKKYNTYAYVGLTEGPSPGDFRYSDGTPVNYTNWYRGEPAGRGKEQCVEMYTDGQWNDRNCLYSRLTICEF

SEQ ID NO: 5338 - protein, 197 aa, Homo Sapiens
MAKNGLVICILVITLLLDQTTSHTSRLKARKHSKRRVRDKDGDLKTQIEKLWTEVNALKEIQALQTVCLRGTKVHKKCYLASEGLKHFHEANEDCISKGGILVIPRNSDEINALQDYGKRSLPGVNDFWLGINDMVTEGKFVDVNGIAISFLNWDRAQPNGGKRENCVLFSQSAQGKWSDEACRSSKRYICEFTIPQ

SEQ ID NO: 5339 - protein, 442 aa, Homo Sapiens
MAGAATGSRTPGRSELVEGCGWRCPEHGDRVAELFCRRCRRCVCALCPVLGAHRGHPVGLALEAAVHVQKLSQECLKQLAIKKQQHIDNITQIEDATEKLKANAESSKTWLKGKFTELRLLLDEEEALAKKFIDKNTQLTLQVYREQADSCREQLDIMNDLSNRVWSISQEPDPVQRLQAYTATEQEMQQQMSLGELCHPVPLSFEPVKSFFKGLVEAVESTLQTPLDIRLKESINCQLSDPSSTKPGTLLKTSPSPERSLLLKYARTPTLDPDTMHARLRLSADRLTVRCGLLGSLGPVPVLRFDALWQVLARDCFATGRHYWEVDVQEAGAGWWVGAAYASLRRRGASAAARLGCNRQSWCLKRYDLEYWAFHDGQRSRLRPRDDLDRLGVFLDYEAGVLAFYDVTGGMSHLHTFRATFQEPLYPALRLWEGAISIPRLP

SEQ ID NO: 5340 - protein, 97 aa, Homo Sapiens [sequence omitted]

SEQ ID NO: 5341 - protein, 678 aa, Homo Sapiens
MAVKVQTTKRGDPHELRNIFLQYASTEVDGERYMTPEDFVQRYLGLYNDPNSNPKIVQLLAGVADQTKDGLISYQEFLAFESVLCAPDSMFIVAFQLFDKSGNGEVTFENVKEIFGQTIIHHHIPFNWDCEFIRLHFGHNRKKHLNYTEFTQFLQELQLEHARQAFALKDKSKSGMISGLDFSDIMVTIRSHMLTPFVEENLVSAAGGSISHQVSFSYFNAFNSLLNNMELVRKIYSTLAGTRKDVEVTKEEFAQSAIRYGQVTPLEIDILYQLADLYNASGRLTLADIERIAPLAEGALPYNLAELQRQQSPGLGRPIWLQIAESAYRFTLGSVAGAVGATAVYPIDLVKTRMQNQRGSGSVVGELMYKNSFDCFKKVLRYEGFFGLYRGLIPQLIGVAPEKAIKLTVNDFVRDKFTRRDGSVPLPAEVLAGGCAGGSQVIFTNPLEIVKIRLQVAGEITTGPRVSALNVLRDLGIFGLYKGAKACFLRDIPFSAIYFPVYAHCKLLLADENGHVGGLNLLAAGAMAGVPAASLVTPADVIKTRLQVAARAGQTTYSGVIDCFRKILREEGPSAFWKGTAARVFRSSPQFGVTLVTYELLQRWFYIDFGGLKPAGSEPTPKSRIADLPPANPDHIGGYRLATATFAGIENKFGLYLPKFKSPSVAVVQPKAAVAATQ

SEQ ID NO: 5342 - protein, 126 aa, Homo Sapiens
MPEPAKSAPAPKKGSKKAVTKAQKKDGKKRKRSRKESYSIYVYKVLKQVHPDTGISSKAMGIMNSFVNDIFERIAGEASRLAHYNKRSTITSREIQTAVRLLLPGELAKHAVSEGTKAVTKYTSSK

SEQ ID NO: 5343 - protein, 399 aa, Homo Sapiens
MAATAAAVVAEEDTELRDLLVQTLENSGVLNRIKAELRAAVFLALEEQEKVENKTPLVNESLKKFLNTKDGRLVASLVAEFLQFFNLDFTLAVFQPETSTLQGLEGRENLARDLGIIEAEGTVGGPLLLEVIRRCQQKEKGPTTGEGALDLSDVHSPPKSPEGKTSAQTTPSKIPRYKGQGKKKTSGQKAGDKKANDEANQSDTSVSLSEPKSKSSLHLLSHETKIGSFLSNRTLDGKDKAGLCPDEDDMEGDSFFDDPIPKPEKTYGLRKEPRKQAGSLASLSDAPPLKSGLSSLAGAPSLKDSESKRGNTVLKDLKLISDKIGSLGLGTGEDDDYVDDFNSTSHRSEKSEISIGEEIEEDLSVEIDDINTSDKLDDLTQDLTVSQLSDVADYLEDVA

SEQ ID NO: 5344 - protein, 230 aa, Homo Sapiens
MNEMYLRCDHENQYAQWMAACMLASKGKTMADSSYQPEVLNILSFLRMKNRNSASQVASSLENMDMNPECFVSPRCAKRHKSKQLAARILEAHQNVAQMPLVEAKLRFIQAWQSLPEFGLTYYLVRFKGSKKDDILGVSYNRLIKIDAATGIPVTTWRFTNIKQWNVNWETRQVVIEFDQNVFTAFTCLSADCKIVHEYIGGYIFLSTRSKDQNETLDEDLFHKLTGGQD

SEQ ID NO: 5345 - protein, 440 aa, Homo Sapiens
MRPHLSPPLQQLLLPVLLACAAHSTGALPRLCDVLQVLWEEQDQCLQELSREQTGDLGTEQPVPGCEGMWDNISCWPSSVPGRMVEVECPRFLRMLTSRNGSLFRNCTQDGWSETFPRPNLACGVNVNDSSNEKRHSYLLKLKVMYTVGYSSSLVMLLVALGILCAFRRLHCTRNYIHMHLFVSFILRALSNFIKDAVLFSSDDVTYCDPHRAGCKLVMVLFQYCIMANYSWLLVEGLYLHTLLAISFFSERKYLQGFVAFGWGSPAIFVALWAIARHFLEDVGCWDINANASIWWIIRGPVILSILINFILFINILRILMRKLRTQETRGNEVSHYKRLARSTLLLIPLFGIHYIVFAFSPEDAMEIQLFFELALGSFQGLVVAVLYCFLNGEVQLEVQKKWQQWHLREFPLHPVASFSNSTKASHLEQSQGTCRTSII

SEQ ID NO: 5346 - protein, 416 aa, Homo Sapiens
MLALLVLVTVALASAHHGGEHFEGEKVFRVNVEDENHINIIRELASTTQIDFWKPDSVTQIKPHSTVDFRVKAEDTVTVENVLKQNELQYKVLISNLRNVVEAQFDSRVRATGHSYEKYNKWETIEAWTQQVATENPALISRSVIGTTFEGRAIYLLKVGKAGQNKPAIFMDCGFHAREWISPAFCQWFVREAVRTYGREIQVTELLDKLDFYVLPVLNIDGYIYTWTKSRFWRKTRSTHTGSSIGTDPNRNFDAGWCEIGASRNPCDETYCGPAAESEKETKALADFIRNKLSSIKAYLTIHSYSQMMIYPYSYAYKLGENNAELNALAKATVKELASLHGTKYTYGPGATTIYPAAGGSDDWAYDQGIRYSFTFELRDTGRYGFLLPESQIRATCEETFLAIKYVASYVLEHLY

SEQ ID NO: 5347 - protein, 1849 aa, Homo Sapiens
MAVSRLDRLFILLDTGTTPVTRKAAAQQLGEVVKLHPHELNNLLSKVLIYLRSANWDTRIAAGQAVEAIVKNVPEWNPVPRTRQEPTSESSMEDSPTTERLNFDRFDICRLLQHGASLLGSAGAEFEVQDEKSGEVDPKERIARQRKLLQKKLGLNMGEAIGMSTEELFNDEDLDYTPTSASFVNKQPTLQAAELIDSEFRAGMSNRQKNKAKRMAKLFAKQRSRDAVETNEKSNDSTDGEPEEKRRKIANVVINQSANDSKVLIDNIPDSSSLIEETNEWPLESFCEELCNDLFNPSWEVRHGAGTGLREILKAHGKSGGKMGDSTLEEMIQQHQEWLEDLVIRLLCVFALDRFGDFVSDEVVAPVRETCAQTLGVVLKHMNETGVHKTVDVLLKLLTQEQWEVRHGGLLGIKYALAVRQDVINTLLPKVLTRIIEGLQDLDDDVRAVAAASLVPVVESLVYLQTQKVPFIINTLWDALLELDDLTASTNSIMTLLSSLLTYPQVQQCSIQQSLTVLVPRVWPFLHHTISSVRRAALETLFTLLSTQDQNSSSWLIPILPDMLRHIFQFCVLESSQEILDLIHKVWMELLSKASVQYVVAAACPWMGAWLCLMMQPSHLPIDLNMLLEVKARAKEKTGGKVRQGQSQNKEVLQEYIAGADTIMEDPATRDFVVMRARMMAAKLLGALCCCICDPGVNVVTQEIKPAESLGQLLLFHLNSKSALQRISVALVICEWAALQKECKAVTLAVQPRLLDILSEHLYYDEIAVPFTRMQNECKQLISSLADVHIEVGNRVNNNVLTIDQASDLVTTVFNEATSSFDLNPQVLQQLDSKRQQVQMTVTETNQEWQVLQLRVHTFAACAVVSLQQLPEKLNPIIKPLMETIKKEENTLVQNYAAQCIAKLLQQCTTRTPCPNSKIIKNLCSSLCVDPYLTPCVTCPVPTQSGQENSKGSTSEKDGMHHTVTKHRGIITLYRHQKAAFAITSRRGPTPKAVKAQIADLPAGSSGNILVELDEAQKPYLVQRRGAEFALTTIVKHFGGEMAVKLPHLWDAMVGPLRNTIDINNFDGKSLLDKGDSPAQELVNSLQVFETAAASMDSELHPLLVQHLPHLYMCLQYPSTAVRHMAARCVGVMSKIATMETMNIFLEKVLPWLGAIDDSVKQEGAIEALACVMEQLDVGIVPYIVLLVVPVLGRMSDQTDSVRFMATQCFATLIRLMPLEAGIPDPPNMSAELIQLKAKERHFLEQLLDGKKLENYKIPVPINAELRKYQQDGVNWLAFLNKYKLHGILCDDMGLGKTLQSICILAGDHCHRAQEYARSKLAECMPLPSLVVCPPTLTGHWVDEVGKFCSREYLNPLHYTGPPTERIRLQHQVKRHNLIVASYDVVRNDIDFFRNIKFNYCILDEGHVIKNGKTKLSKAVKQLTANYRIILSGTPIQNNVLELWSLFDFLMPGFLGTERQFAARYGKPILASRDARSSSREQEAGVLAMDALHRQVLPFLLRRMKEDVLQDLPPKIIQDYYCTLSPLQVQLYEDFAKSRAKCDVDETVSSATLSEETEKPKLKATGHVFQALQYLRKLCNHPALVLTPQHPEFKTTAEKLAVQNSSLHDIQHAPKLSALKQLLLDCGLGNGSTSESGTESVVAQHRILIFCQLKSMLDIVEHDLLKPHLPSVTYLRLDGSIPPGQRHSIVSRFNNDPSIDVLLLTTHVGGLGLNLTGADTVVFVEHDWNPMRDLQAMDRAHRIGQKRVVNVYRLITRGTLEEKIMGLQKFKMNIANTVISQENSSLQSMGTDQLLDLFTLDKDGKAEKADTSTSGKASMKSILENLSDLWDQEQYDSEYSLENFMHSLK

SEQ ID NO: 5348 - protein, 1207 aa, Homo Sapiens
MLLTLIILLPVVSKFSFVSLSAPQHWSCPEGTLAGNGNSTCVGPAPFLIFSHGNSIFRIDTEGTNYEQLVVDAGVSVIMDFHYNEKRIYWVDLERQLLQRVFLNGSRQERVCNIEKNVSGMAINWINEEVIWSNQQEGIITVTDMKGNNSHILLSALKYPANVAVDPVERFIFWSSEVAGSLYRADLDGVGVKALLETSEKITAVSLDVLDKRLFWIQYNREGSNSLICSCDYDGGSVHISKHPTQHNLFAMSLFGDRIFYSTWKMKTIWIANKHTGKDMVRINLHSSFVPLGELKVVHPLAQPKAEDDTWEPEQKLCKLRKGNCSSTVCGQDLQSHLCMCAEGYALSRDRKYCEDVNECAFWNHGCTLGCKNTPGSYYCTCPVGFVLLPDGKRCHQLVSCPRNVSECSHDCVLTSEGPLCFCPEGSVLERDGKTCSGCSSPDNGGCSQLCVPLSPVSWECDCFPGYDLQLDEKSCAASGPQPFLLFANSQDIRHMHFDGTDYGTLLSQQMGMVYALDHDPVENKIYFAHTALKWIERANMDGSQRERLIEEGVDVPEGLAVDWIGRRFYWTDRGKSLIGRSDLNGKRSKIITKENISQPRGIAVHPMAKRLFWTDTGINPRIESSSLQGLGRLVIASSDLIWPSGITIDFLTDKLYWCDAKQSVIEMANLDGSKRRRLTQNDVGHPFAVAVFEDYVWFSDWAMPSVIRVNKRTGKDRVRLQGSMLKPSSLVVVHPLAKPGADPCLYQNGGCEHICKKRLGTAWCSCREGFMKASDGKTCLALDGHQLLAGGEVDLKNQVTPLDILSKTRVSEDNITESQHMLVAEIMVSDQDDCAPVGCSMYARCISEGEDATCQCLKGFAGDGKLCSDIDECEMGVPVCPPASSKCINTEGGYVCRCSEGYQGDGIHCLDIDECQLGVHSCGENASCTNTEGGYTCMCAGRLSEPGLICPDSTPPPHLREDDHHYSVRNSDSECPLSHDGYCLHDGVCMYIEALDKYACNCVVGYIGERCQYRDLKWWELRHAGHGQQQKVIVVAVCVVVLVMLLLLSLWGAHYYRTQKLLSKNPKNPYEESSRDVRSRRPADTEDGMSSCPQPWFVVIKEHQDLKNGGQPVAGEDGQAADGSMQPTSWRQEPQLCGMGTEQGCWIPVSSDKGSCPQVMERSFHMPSYGTQTLEGGVEKPHSLLSANPLWQQRALDPPHQMELTQ

SEQ ID NO: 5349 - protein, 643 aa, Homo Sapiens
METSSSCESLGSQPAAARPPSVDSLSSASTSHSENSVHTKSASVVSSDSISTSADNFSPDLRVLRESNKLAEMEEPPLLPGENIKDMAKDVTYICPFTGAVRGTLTVTNYRLYFKSMERDPPFVLDASLGVINRVEKIGGASSRGENSYGLETVCKDIRNLRFAHKPEGRTRRSIFENLMKYAFPVSNNLPLFAFEYKEVFPENGWKLYDPLLEYRRQGIPNESWRITKINERYELCDTYPALLVVPANIPDEELKRVASFRSRGRIPVLSWIHPESQATITRCSQPMVGVSGKRSKEDEKYLQAIMDSNAQSHKIFIFDARPSVNAVANKAKGGGYESEDAYQNAELVFLDIHNIHVMRESLRKLKEIVYPNIEETHWLSNLESTHWLEHIKLILAGALRIADKVESGKTSVVVHCSDGWDRTAQLTSLAMLMLDGYYRTIRGFEVLVEKEWLSFGHRFQLRVGHGDKNHADADRSPVFLQFIDCVWQMTRQFPTAFEFNEYFLITILDHLYSCLFGTFLCNSEQQRGKENLPKRTVSLWSYINSQLEDFTNPLYGSYSNHVLYPVASMRHLELWVGYYIRWNPRMKPQEPIHNRYKELLAKRAELQKKVEELQREISNRSTSSSERASSPAQCVTPVQTVV

SEQ ID NO: 5350 - protein, 459 aa, Homo Sapiens
RKEAVLSAKMKHPNIVAFKESFEAEGHLYIVMEYCDGGDLMQKIKQQKGKLFPEDMILNWFTQMCLGVNHIHKKRVLHRDIKSKNIFLTQNGKVKLGDFGSARLLSNPMAFACTYVGTPYYVPPEIWENLPYNNKSDIWSLGCILYELCTLKHPFQANSWKNLILKVCQGCISPLPSHYSYELQFLVKQMFKRNPSHRPSATTLLSRGIVARLVQKCLPPEIIMEYGEEVLEEIKNSKHNTPRKKTNPSRIRIALGNEASTVQEEEQDRKGSHTDLESINENLVESALRRVNREEKGNKSVHLRKASSPNLHRRQWEKNVPNTALTALENASILTSSLTAEDDRGGSVIKYSKNTTRKQWLKETPDTLLNILKNADLSLAFQTYTIYRPGSEGFLKGPLSEETEASDSVDGGHDSVILDPERLEPGLDEEDTDFEEEDDNPDWVSELKKRAGWQGLCDR

SEQ ID NO: 5351 - protein, 609 aa, Homo Sapiens
NYKTLIIICALFTLVTVLLWNKCSSDKAIQFPRRSSSGFRVDGFEKRAAASESNNYMNHVAKQQSEEAFPQEQQKAPPVVGGFNSNVGSKVLGLKYEEIDCLINDEHTIKGRREGNEVFLPFTWVEKYFDVYGKVVQYDGYDRFEFSHSYSKVYAQRAPYHPDGVFMSFEGYNVEVRDRVKCISGVEGVPLSTQWGPQGYFYPIQIAQYGLSHYSKNLTEKPPHIEVYETAEDRDKNKPNDWTVPKGCFMANVADKSRFTNVKQFIAPETSEGVSLQLGNTKDFIISFDLKFLTNGSVSVVLETTEKNQLFTIHYVSNAQLIAFKERDIYYGIGPRTSWSTVTRDLVTDLRKGVGLSNTKAVKPTKIMPKKVVRLIAKGKGFLDNITISTTAHMAAFFAASDWLVRNQDEKGGWPIMVTRKLGEGFKSLEPGWYSAMAQGQAISTLVRAYLLTKDHIFLNSALRATAPYKFLSEQHGVKAVFMNKHDWYEEYPTTPSSFVLNGFMYSLIGLYDLKETAGEKLGKEARSLYERGMESLKAMLPLYDTGSGTIYDLRHFMLGIAPNLARWDYHTTHINQLQLLSTIDESPIFKEFVKRWKSYLKGSRAKHN

SEQ ID NO: 5352 - protein, 421 aa, Homo Sapiens [sequence omitted]

SEQ ID NO: 5353 - protein, 744 aa, Homo Sapiens
MAKREDSPGPEVQPMDKQFLVCSICLDRYQCPKVLPCLHTFCERCLQNYIPAQSLTLSCPVCRQTSILPEQGVSALQNNFFISSLMEAMQQAPDGAHDPEDPHPLSVVAGRPFSCPNHEGKTMEFYCEACETAMCGECRAGEHREHGTVLLRDVVEQHKAALQRQLEAVRGRLPQLSAAIALVGGISQQLQERKAEALAQISAAFEDLEQALQQRKQALVSDLETICGAKQKVLQTQLDTLRQGQEHIGSSCSFAEQALRLGSAPEVLLVRKHMRERLAALAAQAFPERPHENAQLELVLEVDGLRRSVLNLGALLTTSATAHETVATGEGLRQALVGQPASLTVTAKDKDGRLVRTGSAELRAEITGPDGTRLPVPVVDHKNGTYELVYTARTEGELLLSVLLYGQPVRGSPFRVRALRPGDLPPSPDDVKRRVKSPGGPGSHVRQKAVRRPSSMYSTGGKRKDNPIEDELVFRVGSRGREKGEFTNLQGVSAASSGRIVVADSNNQCIQVFSNEGQFKFRFGVRGRSPGQLQRPTGVAVDTNGDIIVADYDNRWVSIFSPEGKFKTKIGAGRLMGPKGVAVDRNGHIIVVDNKSCCVFTFQPNGKLVGRFGGRGATDRHFAGPHFVAVSNKNEVVVTDFHNHSEKVYSADGEFLFKFGSHGEGNGQFNAPTGVAVDSNGNIIVADWGNSRIQVFDSSGSFLSYINTSAEPLYGPQGLALTSDGHVVVADAGNHCFKAYRYLQ

SEQ ID NO: 5354 - protein, 267 aa, Homo Sapiens [sequence omitted]

SEQ ID NO: 5355 - protein, 790 aa, Homo Sapiens
MRDAVKKLGGDPEKINPVCPADLVIDHSIQVDFNRRADSLQKNQDLEFERNRERFEFLKWGSQAFHNMRIIPPGSGIIHQVNLEYLARVVFDQDGYYYPDSLVGTDSHTTMIDGLGILGWGVGGIEAEAVMLGQPISMVLPQVIGYRLMGKPHPLVTSTDIVLTITKHLRQVGVVGKFVEFFGPGVAQLSIADRATIANMCPEYGATAAFFPVDEVSITYLVQTGRDEEKLKYIKKYLQAVGMFRDFNDPSQDPDFTQVVELDLKTVVPCCSGPKRPQDKVAVSDMKKDFESCLGAKQGFKGFQVAPEHHNDHKTFIYDNTEFTLAHGSVVIAAITSCTNTSNPSVMLGAGLLAKKAVDAGLNVMPYIKTSLSPGSGVVTYYLQESGVMPYLSQLGFDVVGYGCMTCIGNSGPLPEPVVEAITQGDLVAVGVLSGNRNFEGRVHPNTRANYLASPPLVIAYAIAGTIRIDFEKEPLGVNAKGQQVFLKDIWPTRDEIQAVERQYVIPGMFKEVYQKIETVNESWNALATPSDKLFFWNSKSTYIKSPPFFENLTLDLQPPKSIVDAYVLLNLGDSVTTDHISPAGNIARNSPAARYLTNRGLTPREFNSYGSRRGNDAVMARGTFANIRLLNRFLNKQAPQTIHLPSGEILDVFDAAERYQQAGLPLIVLAGKEYGAGSSRDWAAKGPFLLGIKAVLAESYERIHRSNLVGMGVIPLEYLPGENADALGLTGQERYTIIIPENLKPQMKVQVKLDTGKTFQAVMRFDTDVELTYFLNGGILNYMIRKMAK

SEQ ID NO: 5356 - protein, 129 aa, Homo Sapiens
MSGGRRKEEPPQPQLANGALKVSVWSKVLRSDAAWEDKDEFLDVIYWFRQIIAVVLGVIWGVLPLRGFLGIAGFCLINAGVLYLYFSNYLQIDEEEYGGTWELTKEGFMTSFALFMVIWIIFYTAIHYD

SEQ ID NO: 5357 - protein, 457 aa, Homo Sapiens
MEPWPLLLLFSLCSAGLVLGSEHETRLVAKLFKDYSSVVRPVEDHRQVVEVTVGLQLIQLINVDEVNQIVTTNVRLKQQWVDYNLKWNPDDYGGVKKIHIPSEKIWRPDLVLYNNADGDFAIVKFTKVLLQYTGHITWTPPAIFKSYCEIIVTHFPFDEQNCSMKLGTWTYDGSVVAINPESDQPDLSNFMESGEWVIKESRGWKHSVTYSCCPDTPYLDITYHFVMQRLPLYFIVNVIIPCLLFSFLTGLVFYLPTDSGEKMTLSISVLLSLTVFLLVIVELIPSTSSAVPLIGKYMLFTMVFVIASIIITVIVINTHHRSPSTHVMPNWVRKVFIDTIPNIMFFSTMKRPSREKQDKKIFTEDIDISDISGKPGPPPMGFHSPLIKHPEVKSAIEGIKYIAETMKSDQESNNAAAEWKYVAMVMDHILLGVFMLVCIIGTLAVFAGRLIELNQQG

SEQ ID NO: 5358 - protein, 212 aa, Homo Sapiens
MDYLLMIFSLLFVACQGAPETAVLGAELSAVGENGGEKPTPSPPWRLRRSKRCSCSSLMDKECVYFCHLDIIWVNTPEHVVPYGLGSPRSKRALENLLPTKATDRENRCQCASQKDKKCWNFCQAGKELRAEDIMEKDWNNHKKGKDCSKLGKKCIYQQLVRGRKIRRSSEEHLRQTRSETMRNSVKSSFHDPKLKGNPSRERYVTHNRAHW

SEQ ID NO: 5359 - protein, 651 aa, Homo Sapiens
MKDYDELLKYYELHETIGTGGFAKVKLACHILTGEMVAIKIMDKNTLGSDLPRIKTEIEALKNLRHQHICQLYHVLETANKIFMVLEYCPGGELFDYIISQDRLSEEETRVVFRQIVSAVAYVHSQGYAHRDLKPENLLFDEYHKLKLIDFGLCAKPKGNKDYHLQTCCGSLAYAAPELIQGKSYLGSEADVWSMGILLYVLMCGFLPFDDDNVMALYKKIMRGKYDVPKWLSPSSILLLQQMLQVDPKKRISMKNLLNHPWIMQDYNYPVEWQSKNPFIHLDDDCVTELSVHHRNNRQTMEDLISLWQYDHLTATYLLLLAKKARGKPVRLRLSSFSCGQASATPFTDIKSNNWSLEDVTASDKNYVAGLIDYDWCEDDLSTGAATPRTSQFTKYWTESNGVESKSLTPALCRTPANKLKNKENVYTPKSAVKNEEYFMFPEPKTPVNKNQHKREILTTPNRYTTPSKARNQCLKETPIKIPVNSTGTDKLMTGVISPERRCRSVELDLNQAHMEETPKRKGAKVFGSLERGLDKVITVLTRSKRKGSARDGPRRLKLHYNVTTTRLVNPDQLLNEIMSILPKKHVDFVQKGYTLKCQTQSDFGKVTMQFELEVCQLQKPDVVGIRRQRLKGDAWVYKRLVEDILSSCKV

SEQ ID NO: 5360 - protein, 203 aa, Homo Sapiens
MSKALAFLSFPAYMSKTQCYHTSPCSFKKQQKQALLARPSSTITYLTDSPKPALCVTLAGLIPFVAPPLVMLMTKTYIPILAFTQMAYGASFLSFLGGIRWGFALPEGSPAKPDYLNLASSAAPLFFSWFAFLISERLSEAIVTVIMGMGVAFHLELFLLPHYPNWFKALRIVVTLLATFSFIITLVVKSSFPEKGHKRPGQV

SEQ ID NO: 5361 - protein, 248 aa, Homo Sapiens [sequence omitted]

SEQ ID NO: 5362 - protein, 489 aa, Homo Sapiens
RAPGRLRSVRRLSRPRARPEAVSVTMAMTAGTTTTFPMSNHTRERVTVAKLTLENFYSNLILQHEERETRQKKLEVAMEEEGLADEEKKLRRSQHARKETEFLRLKRTRLGLDDFESLKVIGRGAFGEVRLVQKKDTGHIYAMKILRKSDMLEKEQVAHIRAERDILVEADGAWVVKMFYSFQDKRNLYLIMEFLPGGDMMTLLMKKDTLTEEETQFYISETVLAIDAIHQLGFIHRDIKPDNLLLDAKGHVKLSDFGLCTGLKKAHRTEFYRNLTHNPPSDFSFQNMNSKRKAETWKKNRRQLAYSTVGTPDYIAPEVFMQTGYNKLCDWWSLGVIMYEMLIGYPPFCSETPQETYRKVMNWKETLVFPPEVPISEKAKDLILRFCIDSENRIGNSGVEEIKGHPFFEGVDWEHIRERPAAIPIEIKSIDDTSNFDDFPESDILQPVPNTTEPDYKSKDWVFLNYTYKRFEGLTQRGSIPTYMKAGKL

SEQ ID NO: 5363 - protein, 297 aa, Homo Sapiens
MEDYTKIEKIGEGTYGVVYKGRHKTTGQVVAMKKIRLESEEEGVPSTAIREISLLKELRHPNIVSLQDVLMQDSRLYLIFEFLSMDLKKYLDSIPPGQYMDSSLVKSYLYQILQGIVFCHSRRVLHRDLKPQNLLIDDKGTIKLADFGLARAFGIPIRVYTHEVVTLWYRSPEVLLGSARYSTPVDIWSIGTIFAELATKKPLFHGDSEIDQLFRIFRALGTPNNEVWPEVESLQDYKNTFPKWKPGSLASHVKNLDENGLDLLSKMLIYDPAKRISGKMALNHPYFNDLDNQIKKM

SEQ ID NO: 5364 - protein, 507 aa, Homo Sapiens
MAGAGPKRRALAAPAAEEKEEAREKMLAAKSADGSAPAGEGEGVTLQRNITLLNGVAIIVGTIIGSGIFVTPTGVLKEAGSPGLALVVWAACGVFSIVGALCYAELGTTISKSGGDYAYMLEVYGSLPAFLKLWIELLIIRPSSQYIVALVFATYLLKPLFPTCPVPEEAAKLVACLCVLLLTAVNCYSVKAATRVQDAFAAAKLLALALIILLGFVQIGKGDVSNLDPNFSFEGTKLDVGNIVLALYSGLFAYGGWNYLNFVTEEMINPYRNLPLAIIISLPIVTLVYVLTNLAYFTTLSTEQMLSSEAVAVDFGNYHLGVMSWIIPVFVGLSCFGSVNGSLFTSSRLFFVGSREGHLPSILSMIHPQLLTPVPSLVFTCVMTLLYAFSKDIFSVINFFSFFNWLCVALAIIGMIWLRHRKPELERPIKVNLALPVFFILACLFLIAVSFWKTPVECGIGFTIILSGLPVYFFGVWWKNKPKWLLQGIFSTTVLCQKLMQVVPQET

SEQ ID NO: 5365 - protein, 1640 aa, Homo Sapiens [sequence omitted]

SEQ ID NO: 5366 - protein, 416 aa, Homo Sapiens
KTQGFLTMSRRRISCKDLGHADCQGWLYKKKEKGSFLSNKWKKFWVILKGSSLYWYSNQMAEKADGFVNLPDFTVERASECKKKHAFKISHPQIKTFYFAAENVQEMNVWLNKLGSAVIHQESTTKDEECYSESEQEDPEIAAETPPPPHASQTQSLTAQQASSSSPSLSGTSYSFSSLENTVKTPSSFPSSLSKERQSLPDTVNSLSAAEDEGQPITFAVQVHSPVPSEAGIHKALENSFVTSESGFLNSLSSDDTSSLSSNHDHLTVPDKPAGSKIMDKEETKVSEDDEMEKLYKSLEQASLSPLGDRRPSTKKELRKSFVKRCKNPSINEKLHKIRTLNSTLKCKEHDLAMINQLLDDPKLTARKYREWKVMNTLLIQDIYQQQRASPAPDDTDDTPQELKKSPSSPSVENSI

SEQ ID NO: 5367 - protein, 580 aa, Homo Sapiens
KRGARRGGWKRKMPSTDLLMLKAFEPYLEILEVYSTKAKNYVNGHCTKYEPWQLIAWSVVWTLLIVWGYEFVFQPESLWSRFKKKCFKLTRKMPIIGRKIQDKLNKTKDDISKNMSFLKVDKEYVKALPSQGLSSSAVLEKLKEYSSMDAFWQEGRASGTVYSGEEKLTELLVKAYGDFAWSNPLHPDIFPGLRKIEAEIVRIACSLFNGGPDSCGCVTSGGTESILMACKAYRDLAFEKGIKTPEIVAPQSAHAAFNKAASYFGMKIVRVPLTKMMEVDVRAMRRAISRNTAMLVCSTPQFPHGVIDPVPEVAKLAVKYKIPLHVDACLGGFLIVFMEKAGYPLEHPFDFRVKGVTSISADTHKYGYAPKGSSLVLYSDKKYRNYQFFVDTDWQGGIYASPTIAGSRPGGISAACWAALMHFGENGYVEATKQIIKTARFLKSELENIKGIFVFGNPQLSVIALGSRDFDIYRLSNLMTAKGWNLNQLQFPPSIHFCITLLHARKRVAIQFLKDIRESVTQIMKNPKAKTTGMGAIYGMAQTTVDRNMVAELSSVFLDSLYSTDTVTQGSQMNGSPKPH

SEQ ID NO: 5368 - protein, 374 aa, Homo Sapiens
MAEPGEGLPEEVLALIFRHLSLRDRAAAARVCRAWAAAATCSAVWHDTKISCECELEGMLPPYLSACLDHIHNLRLEFEPSRKPSRRAAIELLMVLAGRAPGLRGLRLECRGEKPLFDAGRDVLEAVHAVCGAANQLRHLDLRRLSFTLDDALVLQAARSCPELHSLFLDNSTLVGSVGPGSVLELLEACPRLRALGLHLASLSHAILEALAAPDRAPFALLALRCACPEDARASPLPNEAWVALRRRHPGLAVELELEPALPAESVTRVLQPAVPVAALRLNLSGDTVGPVRFAAHHYAATLCALEVRAAASAELNAALEELAARCAALREVHCFCVVSHSVLDAFRAHCPRLRTYTLKLTREPHPWRPTLVA

SEQ ID NO: 5369 - protein, 94 aa, Homo Sapiens
VVAILGMGWGAGTGLEMPSAASRGASLLNMQSLGLWTWDCLQGHWAPLIHLNSGPPSGAMERSPTWGEAAELWGSHILLPFRIRHKQTLFASLK

SEQ ID NO: 5370 - protein, 502 aa, Homo Sapiens
MWTADEIAQLCYEHYGIRLPKKGKPEPNHEWTLLAAVVKIQSPADKACDTPDKPVQVTKEIVSMGTGTKCIGQSKMRKNGDILNDSHAEVIARRSFQRYLLHQLQLAATLKEDSIFVPGTQKGVWKLRRDLIFVFFSSHTPCGDASIIPMLEFEDQPCCPVFRNWANNSSVEASSNLEAPGNERKCEDPDSPVTKKMRLEPGTAAREVTNGAAHHQSFGKQKSGPISPGIHSCDLTVEGLATVTRIAPGSAKVTDVYRTGAKCVPGEAGDSGKPGAAFHQVGLLRVKPGRGDRTRSMSCSDKMARWNVLGCQGALLMHLLEEPIYLSAVVIGKCPYSQEAMQRALIGRCQNVSALPKGFGVQELKILQSDLLFEQSRSAVQAKRADSPGRLVPCGAAISWSAVPEQPLDVTANGFPQGTTKKTIGSLQARSQISKVELFRSFQKLLSRIARDKWPHSLRVQKLDTYQEYKEAASSYQEAWSTLRKQVFGSWIRNPPDYHQFK

SEQ ID NO: 5371 - protein, 606 aa, Homo Sapiens
MSHTASSCQELVENCAVHVAGMAQEDSRRGQVPSSFYHGANQELDLSTKVYKRESGSPYSVLVDTKMSKPHLHETEEQPYFRETRAVSDVHAVKEDRENSDDTEEEEEEVSYKREQIIVEVNLNNQTLNVSKGEKGVSSQSKETPVLKTSSEEEEEESEEEATDDSNDYGENEKQKKKEKIVEKVSVTQRRTRRAASVAAATTSPTPRTTRGRRKSVEPPKRKKRATKEPKAPVQKAKCEEKETLTCEKCPRVFNTRWYLEKHMNVTHRRMQICDKCGKKFVLESELSLHQQTDCEKNIQCVSCNKSFKKLWSLHEHIKIVHGYAEKKFSCEICEKKFYTMAHVRKHMVAHTKDMPFTCETCGKSFKRSMSLKVHSLQHSGEKPFRCENCDERFQYKYQLRSHMSIHIGHKQFMCQWCGKDFNMKQYFDEHMKTHTGEKPFICEICGKSFTSRPNMKRHRRTHTGEKPYPCDVCGQRFRFSNMLKAHKEKCFRVTSPVNVPPAVQIPLTTSPATPVPSVVNTATTPTPPINMNPVSTLPPRPIPHPFSHLHIHPHPHHPHHLPIPPVPHLPPPPALFKSEPLNHRGQSEDNFLRHLAEKNSSAQHH

SEQ ID NO: 5372 - protein, 224 aa, Homo Sapiens
MPGSPRPAPSWVLLLRLLALLRPPGLGEACSCAPAHPQQHICHSALVIRAKISSEKVVPASADPADTEKMLRYEIKQIKMFKGFEKVKDVQYIYTPFDSSLCGVKLEANSQKQYLLTGQVLSDGKVFIHLCNYIEPWEDLSLVQRESLNHHYHLNCGCQITTCYTVPCTISAPNECLWTDWLLERKLYGYQAQHYVCMKHVDGTCSWYRGHLPLRKEFVDIVQP

SEQ ID NO: 5373 - protein, 334 aa, Homo Sapiens
MGRRSSDTEEESRSKRKKKHRRRSSSSSSSDSRTYSRKKGGRKSRSKSRSWSRDLQPRSHSYDRRRRHRSSSSSSYGSRRKRSRSRSRGRGKSYRVQRSRSKSRTRRSRSRPRLRSHSRSSERSSHRRTRSRSRDRERRKGRDKEKREKEKDKGKDKELHNIKRGESGNIKAGLEHLPPAEQAKARLQLVLEAAAKADEALKAKERNEEEAKRRKEEDQATLVEQVKRVKEIEAIESDSFVQQTFRSSKEVKKSVEPSEVKQATSTSGPASAVADPPSTEKEIDPTSIPTAIKYQDDNSLAHPNLFIEKADAEEKWFKRLIALRQERLMGSPVA

SEQ ID NO: 5374 - protein, 513 aa, Homo Sapiens
MSIEIESSDVIRLIMQYLKENSLHRALATLQEETTVSLNTVDSIESFVADINSGHWDTVLQAIQSLKLPDKTLIDLYEQVVLELIELRELGAARSLLRQTDPMIMLKQTQPERYIHLENLLARSYFDPREAYPDGSSKEKRRAAIAQALAGEVSVVPPSRLMALLGQALKWQQHQGLLPPGMTIDLFRGKAAVKDVEEEKFPTQLSRHIKFGQKSHVECARFSPDGQYLVTGSVDGFIEVWNFTTGKIRKDLKYQAQDNFMMMDDAVLCMCFSRDTEMLATGAQDGKIKVWKIQSGQCLRRFERAHSKGVTCLSFSKDSSQILSASFDQTIRIHGLKSGKTLKEFRGHSSFVNEATFTQDGHYIISASSDGTVKIWNMKTTECSNTFKSLGSTAGTDITVNSVILLPKNPEHFVVCNRSNTVVIMNMQGQIVRSFSSGKREGGDFVCCALSPRGEWIYCVGEDFVLYCFSTVTGKLERTLTVHEKDVIGIAHHPHQNPIATYSEDGLLKLWKP

SEQ ID NO: 5375 - protein, 787 aa, Homo Sapiens
DLYLLLLSYSDKKDHLTVEELAQFLKVEQKMNNVTTDYCLDIIKKFEVSEENKVKNVLGIEGFTNFMRSPACDIFNPLHHEVYQDMDQPLCNYYIASSHNTYLTGDQLLSQSKVDMYARVLQEGCRCVEVDCWDGPDGEPVVHHGYTLTSKILFRDVVETINKHAFVKNEFPVILSIENHCSIQQQRKIAQYLKGIFGDKLDLSSVDTGECKQLPSPQSLKGKILVKGKKLPYHLGDDAEEGEVSDEDSADEIEDECKFKLHYSNGTTEHQVESFIRKKLESLLKESQIRDKEDPDSFTVRALLKATHEGLNAHLKQSPDVKESGKKSHGRSLMTNFGKHKKTTKSRSKSYSTDDEEDTQQSTGKEGGQLYRLGRRRKTMKLCRELSDLVVYTNSVAAQDIVDDGTTGNVLSFSETRAHQVVQQKSEQFMIYNQKQLTRIYPSAYRIDSSNFNPLPYWNAGCQLVALNYQSEGRMMQLNRAKFKANGNCGYVLKPQQMCKGTFNPFSGDPLPANPKKQLILKVISGQQLPKPPDSMFGDRGEIIDPFVEVEIIGLPVDCCKDQTRVVDDNGFNPVWEETLTFTVHMPEIALVRFLVWDHDPIGRDFVGQRTVTFSSLVPGYRHVYLEGLTEASIFVHITINEIYGKWSPLILNPSYTILHFLGATKNRQLQGLKGLFNKNPRHSSSENNSHYVRKRSIGDRILRRTASAPAKGRKKSKMGFQEMVEIKDSVSEATRDQDGVLRRTTRSLQARPVSMPVDRNLLGALSLPVSETAKDIEGKENSLVQI

SEQ ID NO: 5376 - protein, 252 aa, Homo Sapiens
MESEMETQSARAEEGFTQVTRKGGRRAKKRQAEQLSAAGEGGDAGRMDTEEARPAKRPVFPPLCGDGLLSGKEETRKIPVPANRYTPLKENWMKIFTPIVEHLGLQIRFNLKSRNVEIRTCKETKDVSALTKAADFVKAFILGFQVEDALALIRLDDLFLESFEITDVKPLKGDHLSRAIGRIAGKGGKTKFTIENVTRTRIVLADVKVHILGSFQNIKMARTAICNLILGNPPSKVYGNIRAVASRSADRF

SEQ ID NO: 5377 - protein, 468 aa, Homo Sapiens
MLAVGCALLAALLAAPGAALAPRRCPAQEVARGVLTSLPGDSVTLTCPGVEPEDNATVHWVLRKPAAGSHPSRWAGMGRRLLLRSVQLHDSGNYSCYRAGRPAGTVHLLVDVPPEEPQLSCFRKSPLSNVVCEWGPRSTPSLTTKAVLLVRKFQNSPAEDFQEPCQYSQESQKFSCQLAVPEGDSSFYIVSMCVASSVGSKFSKTQTFQGCGILQPDPPANITVTAVARNPRWLSVTWQDPHSWNSSFYRLRFELRYRAERSKTFTTWMVKDLQHHCVIHDAWSGLRHVVQLRAQEEFGQGEWSEWSPEAMGTPWTESRSPPAENEVSTPMQALTTNKDDDNILFRDSANATSLPVQDSSSVPLPTFLVAGGSLAFGTLLCIAIVLRFKKTWKLRALKEGKTSMHPPYSLGQLVPERPRPTPVLVPLISPPVSPSSLGSDNTSSHNRPDARDPRSPYDISNTDYFFPR

SEQ ID NO: 5378 - protein, 233 aa, Homo Sapiens
MEPTAPSLTEEDLTEVKKDALENLRVYLCEKIIAERHFDHLRAKKILSREDTEEISCRTSSRKRAGKLLDYLQENPKGLDTLVESIRREKTQNFLIQKITDEVLKLRNIKLEHLKGLKCSSCEPFPDGATNNLSRSNSDESNFSEKLRASTVMYHPEGESSTTPFFSTNSSLNLPVLEVGRTENTIFSSTTLPRPGDPGAPPLPPDLQLEEEGTCANSSEMFLPLRSRTVSRQ

SEQ ID NO: 5379 - protein, 551 aa, Homo Sapiens
MIYEEDAEEWALYLTEVFLHVVKREAILLYRLENFSFRHLELLNLTSYKCKLLILSNSLLRDLTPKKCQFLEKILHSPKSVVTLLCGVKSSDQLYELLNISQSRWEISTEQELEDYISVIQSIIFKDSEDYFEVNIPTDLRAKHSGEISERKEIEELSEASRNTIPLAVVLPTEIPCENPGEIFIILRDEVIGDTVEVEFTSSNKRIRTRPALWNKKVWCMKALEFPAGSVHVNVYCDGIVKATTKIKYYPTAKAKECLFRMADSGESLCQNSIEELDGVLTSIFKHEIPYYEFQSLQTEICSQNKYTHFKELPTLLHCAAKFGLKNLAIHLLQCSGATWASKMKNMEGSDPAHIAERHGHKELKKIFEDFSIQEIDINNEQENDYEEDIASFSTYIPSTQNPAFHHESRKTYGQSADGAEANEMEGEGKQNGSGMETKHSPLEVGSESSEDQYDDLYVFIPGADPENNSQEPLMSSRPPLPPPRPVANAFQLERPHFTLPGTMVEGQMERSQNWGHPGVRQETGDDPKGEKEKKEEEKEPGGGRRPIYFC

SEQ ID NO: 5380 - protein, 339 aa, Homo Sapiens
MFLRRAAVAPQRAPILRPAFVPHVLQRADSALSSAAAGPRPMALRPPHQALVGPPLPGPPGPPMMLPPMARAPGPPLGSMAALRPPLEEPAAPRELGLGLGLGLKEKEEAVVAAAAGLEEASAAVAVGAGGAPAGPAVIGPSLPLALAMPLPEPEPLPLPLEVVRGLLPPLRIPELLSLRPRPRPPRPEPPPGLMALEVPEPLGEDKKKGKPEKLKRCIRTAAGSSWEDPSLLEWDADDFRIFCGDLGNEVNDDILARAFSRFPSFLKAKVIRDKRTGKTKGYGFVSFKDPSDYVRAMREMNGKYVGSRPIKLRKSMWKDRNLDVVRKKQKEKKKLGLR

SEQ ID NO: 5381 - protein, 167 aa, Homo Sapiens
MHWGTLCGFLWLWPYLFYVQAVPIQKVQDDTKTLIKTIVTRINDISHTQSVSSKQKVTGLDFIPGLHPILTLSKMDQTLAVYQQILTSMPSRNVIQISNDLENLRDLLHVLAFSKSCHLPWASGLETLDSLGGVLEASGYSTEVVALSRLQGSLQDMLWQLDLSPGC

SEQ ID NO: 5382 - protein, 509 aa, Homo Sapiens
MNLLDPFMKMTDEQEKGLSGAPSPTMSEDSAGSPCPSGSGSDTENTRPQENTFPKGEPDLKKESEEDKFPVCIREAVSQVLKGYDWTLVPMPVRVNGSSKNKPHVKRPMNAFMVWAQAARRKLADQYPHLHNAELSKTLGKLWRLLNESEKRPFVEEAERLRVQHKKDHPDYKYQPRRRKSVKNGQAEAEEATEQTHISPNAIFKALQADSPHSSSGMSEVHSPGEHSGQSQGPPTPPTTPKTDVQPGKADLKREGRPLPEGGRQPPIDFRDVDIGELSSDVISNIETFDVNEFDQYLPPNGHPGVPATHGQVTYTGSYGISSTAATPASAGHVWMSKQQAPPPPPQQPPQAPPAPQAPPQPQAAPPQQPAAPPQQPQAHTLTTLSSEPGQSQRTHIKTEQLSPSHYSEQQQHSPQQIAYSPFNLPHYSPSYPPITRSQYDYTDHQNSSSYYSHAAGQGTGLYSTFTYMNPAQRPMYTPIADTSGVPSIPQTHSPQHWEQPVYTQLTRP

SEQ ID NO: 5383 - protein, 1872 aa, Homo Sapiens
GCSCTAPALSGPVARTIYYIAAELVRLVGSVDSMKPVLQSLYHRVLLYPPPQHRVEAIKIMKEILGSPQRLCDLAGPSSTESESRKRSISKRKSHLDLLKLIMDGMTEACIKGGIEACYAAVSCVCTLLGALDELSQGKGLSEGQVQLLLLRLEELKDGAEWSRDSMEINEADFRWQRRVLSSEHTPWESGNERSLDISISVTTDTGQTTLEGELGQTTPEDHSGNHKNSLKSPAIPEGKETLSKVLETEAVDQPDVVQRSHTVPYPDITNFLSVDCRTRSYGSRYSESNFSVDDQDLSRTEFDSCDQYSMAAEKDSGRSDVSDIGSDNCSLADEEQTPRDCLGHRSLRTAALSLKLLKNQEADQHSARLFIQSLEGLLPRLLSLSNVEEVDTALQNFASTFCSGMMHSPGFDGNSSLSFQMLMNADSLYTAAHCALLLNLKLSHGDYYRKRPTLAPGVMKDFMKQVQTSGVLMVFSQAWIEELYHQVLDRNMLGEAGYWGSPEDNSLPLITMLTDIDGLESSAIGGQLMASAATESPFAQSRRIDDSTVAGVAFARYILVGCWKNLIDTLSTPLTGRMAGSSKGLAFILGAEGIKEQNQKERDAICMSLDGLRKAARLSCALGVAANCASALAQMAAASCVQEEKEEREAQEPSDAITQVKLKVEQKLEQIGKVQGVWLHTAHVLCMEAILSVGLEMGSHNPDCWPHVFRVCEYVGTLEHNHFSDGASQPPLTISQPQKATGSAGLLGDPECEGSPPEHSPEQGRSLSTAPVVQPLSIQDLVREGSRGRASDFRGGSLMSGSSAAKVVLTLSTQADRLFEDATDKLNLMALGGFLYQLKKASQSQLFHSVTDTVDYSLAMPGEVKSTQDRKSALHLFRLGNAMLRIVRSKARPLLHVMRCWSLVAPHLVEAACHKERHVSQKAVSFIHDILTEVLTDWNEPPHFHFNEALFRPFERIMQLELCDEDVQDQVVTSIGELVEVCSTQIQSGWRPLFSALETVHGGNKSEMKEYLVGDYSMGKGQAPVFDVFEAFLNTDNIQVFANAATSYIMCLMKFVKGLGEVDCKEIGDCAPAPGAPSTDLCLPALDYLRRCSQLLAKIYKMPLKPIFLSGRLAGLPRRLQEQSASSEDGIESVLSDFDDDTGLIEVWIILLEQLTAAVSNCPRQHQPPTLDLLFELLRDVTKTPGPGFGIYAVVHLLLPVMSVWLRRSHKDHSYWDMASANFKHAIGLSCELVVEHIQSFLHSDIRYESMINTMLKDLFELLVACVAKPTETISRVGCSCIRYVLVTAGPVFTEEMWRLACCALQDAFSATLKPVKDLLGCFHSGTESFSGEGCQVRVAAPSSSPSAEAEYWRIRAMAQQVFMLDTQCSPKTPNNFDHAQSCQLIIELPPDEKPNGHTKKSVSFREIVVSLLSHQVLLQNLYDILLEEFVKGPSPGEEKTIQVPEAKLAGFLRYISMQNLAVIFDLLLDSYRTAREFDTSPGLKCLLKKVSGIGGAANLYRQSAMSFNIYFHALVCAVLTNQETITAEQVKKVLFEDDERSTDSSQQCSSEDEDIFEETAQVSPPRGKEKRQWRARMPLLSVQPVSNADWVWLVKRLHKLCMELCNNYIQMHLDLENCMEEPPIFKGDPFFILPSFQSESSTPSTGGFSGKETPSEDDRSQSREHMGESLSLKAGGGDLLLPPSPKVEKKDPSRKKEWWENAGNKIYTMAADKTISKLMTEYKKRKQQHNLSAFPKEVKVEKKGEPLGPRGQDSPLLQRPQHLMDQGQMRHSFSAGPELLRQDKRPRSGSTGSSLSVSVRDAEAQIQAWTNMVLTVLNQIQILPDQTFTALQPAVFPCISQLTCHVTDIRVRQAVREWLGRVGRVYDIIV

SEQ ID NO: 5384 - protein, 250 aa, Homo Sapiens
MRGTPKTHLLAFSLLCLLSKVRTQLCPTPCTCPWPPPRCPLGVPLVLDGCGCCRVCARRLGEPCDQLHVCDASQGLVCQPGAGPGGRGALCLLAEDDSSCEVNGRLYREGETFQPHCSIRCRCEDGGFTCVPLCSEDVRLPSWDCPHPRRVEVLGKCCPEWVCGQGGGLGTQPLPAQGPQFSGLVSSLPPGVPCPEWSTAWGPCSTTCGLGMATRVSNQNRFCRLETQRRLCLSRPCPPSRGRSPQNSAF

SEQ ID NO: 5385 - protein, 272 aa, Homo Sapiens
MSCHNCSDPQVLCSSGQLFLQPLWDHLRSWEALLQSPFFPVIFSITTYVGFCLPFVVLDILCSWVPALRRYKIHPDFSPSAQQLLPCLGQTLYQHVMFVFPVTLLHWARSPALLPHEAPELLLLLHHILFCLLLFDMEFFVWHLLHHKVPWLYRTFHKVHHQNSSSFALATQYMSVWELFSLGFFDMMNVTLLGCHPLTTLTFHVVNIWLSVEDHSGYNFPWSTHRLVPFGWYGGVVHHDLHHSHFNCNFAPYFTHWDKILGTLRTASVPAR

SEQ ID NO: 5386 - protein, 438 aa, Homo Sapiens
MVQWKRLCQLHYLWALGCYMLLATVALKLSFRLKCDSDHLGLESRESQSQYCRNILYNFLKLPAKRSINCSGVTRGDQEAVLQAILNNLEVKKKREPFTDTHYLSLTRDCEHFKAERKFIQFPLSKEEVEFPIAYSMVIHEKIENFERLLRAVYAPQNIYCVHVDEKSPETFKEAVKAIISCFPNVFIASKLVRVVYASWSRVQADLNCMEDLLQSSVPWKYFLNTCGTDFPIKSNAEMVQALKMLNGRNSMESEVPPKHKETRWKYHFEVVRDTLHLTNKKKDPPPYNLTMFTGNAYIVASRDFVQHVLKNPKSQQLIEWVKDTYSPDEHLWATLQRARWMPGSVPNHPKYDISDMTSIARLVKWQGHEGDIDKGAPYAPCSGIHQRAICVYGAGDLNWMLQNHHLLANKFDPKVDDNALQCLEEYLRYKAIYGTEL

SEQ ID NO: 5387 - protein, 461 aa, Homo Sapiens
MWQLTSLLLFVATWGISGTPAPLDSVFSSSERAHQVLRIRKRANSFLEELRHSSLERECIEEICDFEEAKEIFQNVDDTLAFWSKHVDGDQCLVLPLEHPCASLCCGHGTCIDGIGSFSCDCRSGWEGRFCQREVSFLNCSLDNGGCTHYCLEEVGWRRCSCAPGYKLGDDLLQCHPAVKFPCGRPWKRMEKKRSHLKRDTEDQEDQVDPRLIDGKMTRRGDSPWQVVLLDSKKKLACGAVLIHPSWVLTAAHCMDESKKLLVRLGEYDLRRWEKWELDLDIKEVFVHPNYSKSTTDNDIALLHLAQPATLSQTIVPICLPDSGLAERELNQAGQETLVTGWGYHSSREKEAKRNRTFVLNFIKIPVVPHNECSEVMSNMVSENMLCAGILGDRQDACEGDSGGPMVASFHGTWFLVGLVSWGEGCGLLHNYGVYTKVSRYLDWIHGHIRDKEAPQKSWAP

SEQ ID NO: 5388 - protein, 787 aa, Homo Sapiens
MAQEAPQEDTSPMALMDKGENELTGSASEESQETTTSTIITTTVITTEQAPALCSVSFSNPEGYIDSSDYPLLPLNNFLECTYNVTVYTGYGVELQVKSVNLSDGELLSIRGVDGPTLTVLANQTLLVEGQVIRSPTNTISVYFRTFQDDGLGTFQLHYQAFMLSCNFPRRPDSGDVTVMDLHSGGVAHFHCHLGYELQGAKMLTCINASKPHWSSQEPICSAPCGGAVHNATIGRVLSPSYPENTNGSQFCIWTIEAPEGQKLHLHFERLLLHDKDRMTVHSGQTNKSALLYDSLQTESVPFEGLLSEGNTIRIEFTSDQARAASTFNIRFEAFEKGHCYEPYIQNGNFTTSDPTYNIGTIVEFTCDPGHSLEQGPAIIECINVRDPYWNDTEPLCRAMCGGELSAVAGVVLSPNWPEPYVEGEDCIWKIHVGEEKRIFLDIQFLNLSNSDILTIYDGDEVMPHILGQYLGNSGPQKLYSSTPDLTIQFHSDPAGLIFGKGQGFIMNYIEVSRNDSCSDLPEIQNGWKTTSHTELVRGARITYQCDPGYDIVGSDTLTCQWDLSWSSDPPFCEKIMYCTDPGEVDHSTRLISDPVLLVGTTIQYTCNPGFVLEGSSLLTCYSRETGTPIWTSRLPHCVSEESLACDNPGLPENGYQILYKRLYLPGESLTFMCYEGFELMGEVTIRCILGQPSHWNGPLPVCKVNQDSFEHALEAEAAAETSLEGGNMALAIFIPVLIISLLLGGAYIYITRCRYYSNLRLPLMYSHPYSQITVETEFDNPIYETG

SEQ ID NO: 5389 - protein, 160 aa, Homo Sapiens
MLIGKTWTDFEHMETIEKGYCNPGIQLCSVGSYTINFRVMSCDSFPIRRLSTPSSVTKPANSVFTTKWIWYWKNESGTWIQYGEEKDKRKNSNVDSSYLESLYQSCPRGVVPFQAGSRNYELSFQGMIQTNIASKTQKDVIRRPTFVPQWYVQQMKRGPE

SEQ ID NO: 5390 - protein, 1217 aa, Homo Sapiens
MFLYNLTLQRATGISFAIHGNFSGTKQQEIVVSRGKILELLRPDPNTGKVHTLLTVEVFGVIRSLMAFRLTGGTKDYIVVGSDSGRIVILEYQPSKNMFEKIHQETFGKSGCRRIVPGQFLAVDPKGRAVMISAIEKQKLVYILNRDAAARLTISSPLEAHKANTLVYHVVGVDVGFENPMFACLEMDYEEAGNDPTGEAAANTQQTLTFYELDLGLNHVVRKYSEPLEEHGNFLITVPGGSDGPSGVLICSENYITYKNFGDQPDIRCPIPRRRNDLDDPERGMIFVCSATHKTKSMFFFWAQTEQGDIFKITLETDEDMVTEIRLKYFDTVPVAAAMCVLKTGFLFVASEFGNHYLYQIAHLGDDDEEPEFSSAMPLEEGDTFFFQPRPLKNLVLVDELDSLSPILFCQIADLANEDTPQLYVACGRGPRSSLRVLRHGLEVSEMAVSELPGNPNAVWTVRRHIEDEFDAYIIVSFVNATLVLSIGETVEEVTDSGFLGTTPTLSCSLLGDDALVQVYPDGIRHIRADKRVNEWKTPGKKTIVKCAVNQRQVVIALTGGELVYFEMDPSGQLNEYTERKEMSADVVCMSLANVPPGEQRSRFLAVGLVDNTVRIISLDPSDCLQPLSMQALPAQPESLCIVEMGGTEKQDELGERGSIGFLYLNIGLQNGVLLRTVLDPVTGDLSDTRTRYLGSRPVKLFRVRMQGQEAVLAMSSRSWLSYSYQSRFHLTPLSYETLEFASGFASEQCPEGIVAISTNTLRILALEKLGAVFNQVAFPLQYTPRKFVIHPESNNLIIIETDHNAYTEATKAQRKQQMAEEMVEAAGEDERELAAEMAAAFLNENLPESIFGAPKAGNGQWASVIRVMNPIQGNTLDLVQLEQNEAAFSVAVCRFSNTGEDWYVLVGVAKDLILNPRSVAGGFVYTYKLVNNGEKLEFLHKTPVEEVPAAIAPFQGRVLIGVGKLLRVYDLGKKKLLRKCENKHIANYISGIQTIGHRVIVSDVQESFIWVRYKRNENQLIIFADDTYPRWVTTASLLDYDTVAGADKFGNICVVRLPPNTNDEVDEDPTGNKALWDRGLLNGASQKAEVIMNYHVGETVLSLQKTTLIPGGSESLVYTTLSGGIGILVPFTSHEDHDFFQHVEMHLRSEHPPLCGRDHLSFRSYYFPVKNVIDGDLCEQFNSMEPNKQKNVSEELDRTPPEVSKKLEDIRTRYAF

SEQ ID NO: 5391 - protein, 343 aa, Homo Sapiens
MGPMLDAATRKPIWRHEILDADGICSPGEKVENKQVLVNKSMPTVTQIPLEGSNVPQQPQYKDVPITYKGATDSYIEKVMISSNAEDAFLIKMLLRQTRRPEIGDKFSSRHGQKGVCGLIVPQEDMPFCDSGICPDIIMNPHGFPSRMTVGKLIELLAGKAGVLDGRFHYGTAFGGSKVKDVCEDLVRHGYNYLGKDYVTSGITGEPLEAYIYFGPVYYQKLKHMVLDKMHARARGPRAVLTRQPTEGRSRDGGLRLGEMERDCLIGYGASMLLLERLMISSDAFEVDVCGQCGLLGYSGWCHYCKSSCHVSSLRIPYACKLLFQELQSMNIIPRLKLSKYNE

SEQ ID NO: 5392 - protein, 394 aa, Homo Sapiens
MVTMEELREMDCSVLKRLMNRDENGGGAGGSGSHGTLGLPSGGKCLLLDCRPFLAHSAGYILGSVNVRCNTIVRRRAKGSVSLEQILPAEEEVRARLRSGLYSAVIVYDERSPRAESLREDSTVSLVVQALRRNAERTDICLLKGGYERFSSEYPEFCSKTKALAAIPPPVPPSATEPLDLGCSSCGTPLHDQGGPVEILPFLYLGSAYHAARRDMLDALGITALLNVSSDCPNHFEGHYQYKCIPVEDNHKADISSWFMEAIEYIDAVKDCRGRVLVHCQAGISRSATICLAYLMMKKRVRLEEAFEFVKQRRSIISPNFSFMGQLLQFESQVLATSCAAEAASPSGPLRERGKTPATPTSQFVFSFPVSVGVHSAPSSLPYLHSPITTSPSC

SEQ ID NO: 5393 - protein, 919 aa, Homo Sapiens
ELNHLPLGTSILSAPLSSDGILIVSRPSDLLSMMSDEKNLGVSQKLVSPSRSTSSCSSKQGSRQDSWEVVEGLRGEMNYTQEPPVQKGFLLKKRKWPLKGWHKRFFYLDKGILKYAKSQTDIEREKLHGCIDVGLSVMSVKKSSKCIDLDTEEHIYHLKVKSEEVFDEWVSKLRHHRMYRQNEIAMFPHEVNHFFSGSTITDSSSGVFDSISSRKRSSISKQNLFQTGSNVSFSCGGETRVPLWLQSSEDMEKCSKDLAHCHAYLVEMSQLLQSMDVLHRTYSAPAINAIQGGSFESPKKEKRSHRRWRSRAIGKDAKGTLQVPKPFSGPVRLHSSNPNLSTLDFGEEKNYSDGSETSSEFSKMQEDLCHIAHKVYFTLRSAFNIMSAEREKLKQLMEQDASSSPSAQVIGLKNALSSALAQNTDLKERLRRIHAESLLLDSPAVAKSGDNLAEENSRDENRALVHQLSNESRLSITDSLSEFFDAQEVLLSPSSSENEISDDDSYVSDISDNLSLDNLSNDLDNERQTLGPVLDSGREAKSRRRTCLPAPCPSSSNISLWNILRNNIGKDLSKVAMPVELNEPLNTLQRLCEELEYSELLDKAAQIPSPLERMVYVAAFAISAYASSYYRAGSKPFNPVLGETYECIREDKGFQFFSEQVSHHPPISACHAESRNFVFWQDVRWKNKFWGKSMEIVPIGTTHVTLPVFGDHFEWNKVTSCIHNILSGQRWIEHYGEIVIKNLHDDSCYCKVNFIKAKYWSTNAHEIEGTVFDRSGKAVHRLFGKWHESIYCGGGSSSACVWRANPMPKGYEQYYSFTQFALELNEMDPSSKSLLPPTDTRFRPDQRFLEEGNLEEAEIQKQRIEQLQRERRRVLEENHVEHQPRFFRKSDDDSWVSNGTYLELRKDLGFSKLDHPVLW

SEQ ID NO: 5394 - protein, 273 aa, Homo Sapiens
MNWSIFEGLLSGVNKYSTAFGRIWLSLVFIFRVLVYLVTAERVWSDDHKDFDCNTRQPGCSNVCFDEFFPVSHVRLWALQLILVTCPSLLVVMHVAYREVQEKRHREAHGENSGRLYLNPGKKRGGLWWTYVCSLVFKASVDIAFLYVFHSFYPKYILPPVVKCHADPCPNIVDCFISKPSEKNIFTLFMVATAAICILLNLVELIYLVSKRCHECLAARKAQAMCTGHHPHGTTSSCKQDDLLSGDLIFLGSDSHPPLLPDRPRDHVKKTIL

SEQ ID NO: 5395 - protein, 657 aa, Homo Sapiens
MRRAVCFPALCLLLNLHAAGCFSGNNDHFLAINQKKSGKPVFIYKHSQDIEKSLDIAPQKIYRHSYHSSSEAQVSKRHQIVNSAFPRPAYDPSLNLLAMDGQDLEVENLPIPAANVIVVTLQMDVNKLNITLLRIFRQGVAAALGLLPQQVHINRLIGKKNSIELFVSPINRKTGISDALPSEEVLRSLNINVLHQSLSQFGITEVSPEKNVLQGQHEADKIWSKEGFYAVVIFLSIFVIIVTCLMILYRLKERFQLSLRQDKEKNQEIHLSPITLQPALSEAKTVHSMVQPEQAPKVLNVVVDPQGRGAPEIRATTATSVCPSPFKMKPIGLQERRGSNVSLTLDMSSLGNIEPFVSIPTPREKVAMEYLQSASRILTRSQLRDVVASSHLLQSEFMEIPMNFVDPKEIDIPRHGTKNRYKTILPNPLSRVCLRPKNVTDSLSTYINANYIRGYSGKEKAFIATQGPMINTVDDFWQMVWQEDSPVIVMITKLKEKNEKCVLYWPEKRGIYGKVEVLVISVNECDNYTIRNLVLKQGSHTQHVKHYWYTSWPDHKTPDSAQPLLQLMLDVEEDRLASQGRGPVVVHCSAGIGRTGCFIATSIGCQQLKEEGVVDALSIVCQLRMDRGGMVQTSEQYEFVHHALCLYESRLSAETVQ

SEQ ID NO: 5396 - protein, 160 aa, Homo Sapiens
MKQPGNETADTVLKKLDEQYQKYKFMELNLAQKKRRLKGQIPEIKQTLEILKYMQKKKESTNSMETRFLLADNLYCKASVPPTDKVCLWLGANVMLEYDIDEAQALLEKNLSTATKNLDSLEEDLDFLRDQFTTTEVNMARVYNWDVKRRNKDDSTKNKA

SEQ ID NO: 5397 - protein, 941 aa, Homo Sapiens
MASPRSSGQPGPPPPPPPPPARLLLLLLLPLLLPLAPGAWGWARGAPRPPPSSPPLSIMGLMPLTKEVAKGSIGRGVLPAVELAIEQIRNESLLRPYFLDLRLYDTECDNAKGLKAFYDAIKYGPNHLMVFGGVCPSVTSIIAESLQGWNLVQLSFAATTPVLADKKKYPYFFRTVPSDNAVNPAILKLLKHYQWKRVGTLTQDVQRFSEVRNDLTGVLYGEDIEISDTESFSNDPCTSVKKLKGNDVRIILGQFDQNMAAKVFCCAYEENMYGSKYQWIIPGWYEPSWWEQVHTEANSSRCLRKNLLAAMEGYIGVDFEPLSSKQIKTISGKTPQQYEREYNNKRSGVGPSKFHGYAYDGIWVIAKTLQRAMETLHASSRHQRIQDFNYTDHTLGRIILNAMNETNFFGVTGQVVFRNGERMGTIKFTQFQDSREVKVGEYNAVADTLEIINDTIRFQGSEPPKDKTIILEQLRKISLPLYSILSALTILGMIMASAFLFFNIKNRNQKLIKMSSPYMNNLIILGGMLSYASIFLFGLDGSFVSEKTFETLCTVRTWILTVGYTTAFGAMFAKTWRVHAIFKNVKMKKKIIKDQKLLVIVGGMLLIDLCILICWQAVDPLRRTVEKYSMEPDPAGRDISIRPLLEHCENTHMTIWLGIVYAYKGLLMLFGCFLAWETRNVSIPALNDSKYIGMSVYNVGIMCIIGAAVSFLTRDQPNVQFCIVALVIIFCSTITLCLVFVPKLITLRTNPDAATQNRRFQFTQNQKKEDSKTSTSVTSVNQASTSRLEGLQSENHRLRMKITELDKDLEEVTMQLQDTPEKTTYIKQNHYQELNDILNLGNFTESTDGGKAILKNHLDQNPQLQWNTTEPSRTCKDPIEDINSPEHIQRRLSLQLPILHHAYLPSIGGVDASCVSPCVSPTASPRHRHVPPSFRVMVSGL

SEQ ID NO: 5398 - protein, 1026 aa, Homo Sapiens
MMSFGGADALLGAPFAPLHGGGSLHYALARKGGAGGTRSAAGSSSGFHSWTRTSVSSVSASPSRFRGAGAASSTDSLDTLSNGPEGCMVAVATSRSEKEQLQALNDRFAGYIDKVRQLEAHNRSLEGEAAALRQQQAGRSAMGELYEREVREMRGAVLRLGAARGQLRLEQEHLLEDIAHVRQRLDDEARQREEAEAAARALARFAQEAEAARVDLQKKAQALQEECGYLRRHHQEEVGELLGQIQGSGAAQAQMQAETRDALKCDVTSALREIRAQLEGHAVQSTLQSEEWFRVRLDRLSEAAKVNTDAMRSAQEEITEYRRQLQARTTELEALKSTKDSLERQRSELEDRHQADIASYQEAIQQLDAELRNTKWEMAAQLREYQDLLNVKMALDIEIAAYRKLLEGEECRIGFGPIPFSLPEGLPKIPSVSTHIKVKSEEKIKVVEKSEKETVIVEEQTEETQVTEEVTEEEEKEAKEEEGKEEEGGEEEEAEGGEEETKSPPAEEAASPEKEAKSPVKEEAKSPAEAKSPEKEEAKSPAEVKSPEKAKSPAKEEAKSPPEAKSPEKEEAKSPAEVKSPEKAKSPAKEEAKSPAEAKSPEKAKSPVKEEAKSPAEAKSPVKEEAKSPAEVKSPEKAKSPTKEEAKSPEKAKSPEKAKSPEKEEAKSPEKAKSPVKAEAKSPEKAKSPVKAEAKSPEKAKSPVKEEAKSPEKAKSPVKEEAKSPEKAKSPVKEEAKTPEKAKSPVKEEAKSPEKAKSPEKAKTLDVKSPEAKTPAKEEARSPADKFPEKAKSPVKEEVKSPEKAKSPLKEDAKAPEKEIPKKEEVKSPVKEEEKPQEVKVKEPPKKAEEEKAPATPKTEEKKDSKKEEAPKKEAPKPKVEEKKEPAVEKPKESKVEAKKEEAEDKKKVPTPEKEAPAKVEVKEDAKPKEKTEVAKKEPDDAKAKEPSKPAEKKEAAPEKKDTKEEKAKKPEEKPKTEAKAKEDDKTLSKEPSKPKAEKAEKSSSTDQKDSKPPEKATEDKAAKGK

SEQ ID NO: 5399 - protein, 1184 aa, Homo Sapiens
MVLLWEPAGAWLALGLALALGPSVAAAAPRQDCTGVECPPLENCIEEALEPGACCATCVQQGCACEGYQYYDCLQGGFVRGRVPAGQSYFVDFGSTECSCPPGGGKISCQFMLCPELPPNCIEAVVVADSCPQCGQVGCVHAGHEYAAGHTVHLPPCRACHCPDAGGELICYQLPGCHGNFSDAEEGDPERHYEDPYSYDQEVAEVEAATALGGEVQAGAVQAGAGGPPAALGGGSQPLSTIQAPPWPAVLPRPTAAAALGPPAPVQAKARRVTEDSEEEEEEEEEREEMAVTEQLAAGGHRGLDGLPTTAPAGPSLPIQEERAEAGARAEAGARPEENLILDAQATSRSTGPEGVTHAPSLGKAALVPTQAVPGSPRDPVKPSPHNILSTSLPDAAWIPPTREVPRKPQVLPHSHVEEDTDPNSVHSIPRSSPEGSTKDLIETCCAAGQQWAIDNDECLEIPESGTEDNVCRTAQRHCCVSYLQEKSCMAGVLGAKEGETCGAEDNDSCGISLYKQCCDCCGLGLRVRAEGQSCESNPNLGYPCNHVMLSCCEGEEPLIVPEVRRPPEPAAAPRRVSEAEMAGREALSLGTEAELPNSLPGDDQDECLLLPGELCQHLCINTVGSYHCACFPGFSLQDDGRTCRPEGHPPQPEAPQEPALKSEFSQVASNTIPLPLPQPNTCKDNGPCKQVCSTVGGSAICSCFPGYAIMADGVSCEDINECVTDLHTCSRGEHCVNTLGSFHCYKALTCEPGYALKDGECEDVDECAMGTHTCQPGFLCQNTKGSFYCQARQRCMDGFLQDPEGNCVDINECTSLSEPCRPGFSCINTVGSYTCQRNPLICARGYHASDDGAKCVDVNECETGVHRCGEGQVCHNLPGSYRCDCKAGFQRDAFGRGCIDVNECWASPGRLCQHTCENTLGSYRCSCASGFLLAADGKRCEDVNECEAQRCSQECANIYGSYQCYCRQGYQLAEDGHTCTDIDECAQGAGILCTFRCLNVPGSYQCACPEQGYTMTANGRSCKDVDECALGTHNCSEAETCHNIQGSFRCLRFECPPNYVQVSKTKCERTTCHDFLECQNSPARITHYQLNFQTGLLVPAHIFRIGPAPAFTGDTIALNIIKGNEEGYFGTRRLNAYTGVVYLQRAVLEPRDFALDVEMKLWRQGSVTTFLAKMHIFFTTFAL

SEQ ID NO: 5400 - protein, 269 aa, Homo Sapiens
MAASAGAGAVIAAPDSRRWLWSVLAAALGLLTAGVSALEVYTPKEIFVANGTQGKLTCKFKSTSTTGGLTSVSWSFQPEGADTTVSFFHYSQGQVYLGNYPPFKDRISWAGDLDKKDASINIENMQFIHNGTYICDVKNPPDIVVQPGHIRLYVVEKENLPVFPVWVVVGIVTAVVLGLTLLISMILAVLYRRKNSKRDYTGCSTSESLSPVKQAPRKSPSDTEGLVKSLPSGSHQGPVIYAQLDHSGGHHSDKINKSESVVYADIRKN

SEQ ID NO: 5401 - protein, 547 aa, Homo Sapiens [sequence omitted]

SEQ ID NO: 5402 - protein, 632 aa, Homo Sapiens
MTTSALRRQVKNIVHNYSEAEIKVREATSNDPWGPPSSLMSEIADLTFNTVAFTEVMGMLWRRLNDSGKNWRHVYKALTLLDYLLKTGSERVAHQCRENLYTIQTLKDFQYIDRDGKDQGVNVREKVKQVMALLKDEERLRQERTHALKTKERMALEGIGIGSGQLGFSRRYGEDYSRSRGSPSSYNSSSSSPRYTSDLEQARPQTSGEEELQLQLALAMSREEAEKPVPPASHRDEDLQLQLALRLSRQEHEKEVRSWQGDGSPMANGAGAVVHHQRDREPEREERKEEEKLKTSQSSILDLADIFVPALAPPSTHCSADPWDIPGFRPNTEASGSSWGPSADPWSPIPSGTVLSRSQPWDLTPMLSSSEPWGRTPVLPAGPPTTDPWALNSPHYKLPSTGADPWGASLETSDTPGGASTFDPFAKPPESTETKEGLEQALPSGKPSSPVELDLFGDPSPSSKQNGTKEPDALDLGILGEALTQPSKEARACRTPESFLGPSASSLVNLDSLVKAPQVAKTRNPFLTGLSAPSPTNPFGAGETGRPTLNQMRTGSPALGLAGGPVGAPLGSMTYSASLPLPLSSVPAGLTLPASVSVFPQAGAFAPQPLLPTPSSAGPRPPPPQTGTNPFL

SEQ ID NO: 5403 - protein, 499 aa, Homo Sapiens
MPHPRRYHSSERGSRGSYREHYRSRKHKRRRSRSWSSSSDRTRRRRREDSYHVRSRSSYDDRSSDRRVYDRRYCGSYRRNDYSRDRGDAYYDTDYRHSYEYQRENSSYRSQRSSRRKHRRRRRRSRTFSRSSSQHSSRRAKSVEDDAEGHLIYHVGDWLQERYEIVSTLGEGTFGRVVQCVDHRRGGARVALKIIKNVEKYKEAARLEINVLEKINEKDPDNKNLCVQMFDWFDYHGHMCISFELLGLSTFDFLKDNNYLPYPIHQVRHMAFQLCQAVKFLHDNKLTHTDLKPENILFVNSDYELTYNLEKKRDERSVKSTAVRVVDFGSATFDHEHHSTIVSTRHYRAPEVILELGWSQPCDVWSIGCIIFEYYVGFTLFQTHDNREHLAMMERILGPIPSRMIRKTRKQKYFYRGRLDWDENTSAGRYVRENCKPLRRYLTSEAEEHHQLFDLIESMLEYEPAKRLTLGEALQHPFFARLRAEPPNKLWDSSRDISR

SEQ ID NO: 5404 - protein, 256 aa, Homo Sapiens
MLWQKPTAPEQAPAPARPYQGVRVKEPVKELLRRKRGHASSGAAPAPTAVVLPHQPLATYTTVGPSCLDMEGSVSAVTEEAALCAGWLSQPTPATLQPLAPWTPYTEYVPHEAVSCPYSADMYVQPVCPSYTVVGPSSVLAYASPPLITNVTTRSSATPAVGPPLEGPEHQAPLTYFPWPQPLSTLPTSTLQYRPPAPALPGPQFVQLPISIPEPVLQDMEDPRRAASSLTIDKLLLEEEDSDAYALNHTLSVEGF

SEQ ID NO: 5405 - protein, 423 aa, Homo Sapiens
MMYRPDVVRARKRVCWEPWVIGLVIFISLIVLAVCIGLTVHYVRYNQKKTYNYYSTLSFTTDKLYAEFGREASNNFTEMSQRLESMVKNAFYKSPLREEFVKSQVIKFSQQKHGVLAHMLLICRFHSTEDPETVDKIVQLVLHEKLQDAVGPPKVDPHSVKIKKINKTETDSYLNHCCGTRRSKTLGQSLRIVGGTEVEEGEWPWQASLQWDGSHRCGATLINATWLVSAAHCFTTYKNPARWTASFGVTIKPSKMKRGLRRIIVHEKYKHPSHDYDISLAELSSPVPYTNAVHRVCLPDASYEFQPGDVMFVTGFGALKNDGYSQNHLRQAQVTLIDATTCNEPQAYNDAITPRMLCAGSLEGKTDACQGDSGGPLVSSDARDIWYLAGIVSWGDECAKPNKPGVYTRVTALRDWITSKTGI

SEQ ID NO: 5406 - protein, 368 aa, Homo Sapiens
MVSILTVLLCLRLSLGQKAQALAGTLPKPSLWAEPGSVITWESPMTLWCQGTLDTQGYYLTKEGNPMTWYQQSPPEPRNKTNFFIPSMREHHAGRYHCHYLSPAGWSERSEPLELVVTGVSRKPSLLTLQGPVVAPGENLTLQCGSDVGYDKFTLYKEGGHDLVQGSGRQPQAGLSQANFTLGPVRVSHGGQYRCYGAHNLSSEWSAPSDPLSILIAGQIRGRPSLSVQPGPTVASGENVTLLCQSREQLDTFLLTKEGAAHHPLRLRSEHQAQQHQAEFPMSPVTSAHAGTYRCYSSRRFFPYLLSHPSDPLELVVSGAAETLSPSQNKTDSKTASPASHPQDYTVENLIRVAVAGLVLVVLGILLL

SEQ ID NO: 5407 - protein, 90 aa, Homo Sapiens
MKLSVCLLLVTLALCCYQANAEFCPALVSELLDFFFISEPLFKLSLAKFDAPPEAVAAKLGVKRCTDQMSLQKRSLIAEVLVKILKKCSV

SEQ ID NO: 5408 - protein, 1020 aa, Homo Sapiens
MQSCARAWGLRLGRGVGGGRRLAGGSGPCWAPRSRDSSSGGGDSAAAGASRLLERLLPRHDDFARRHIGPGDKDQREMLQTLGLASIDELIEKTVPANIRLKRPLKMEDPVCENEILATLHAISSKNQIWRSYIGMGYYNCSVPQTILRNLLENSGWITQYTPYQPEVSQGRLESLLNYQTMVCDITGLDMANASLLDEGTAAAEALQLCYRHNKRRKFLVDPRCHPQTIAVVQTRAKYTGVLTELKLPCEMDFSGKDVSGVLFQYPDTEGKVEDFTELVERAHQSGSLACCATDLLALCILRPPGEFGVDIALGSSQRFGVPLGYGGPHAAFFAVRESLVRMMPGRMVGVTRDATGKEVYRLALQTREQHIRRDKATSNICTAQALLANMAAMFRIYHGSHGLEHIARRVHNATLILSEGLKRAGHQLQHDLFFDTLKIHCGCSVKEVLGRAAQRQINFRLFEDGTLGISLDETVNEKDLDDLLWIFGCESSAELVAESMGEECRGIPGSVFKRTSPFLTHQVFNSYHSETNIVRYMKKLENKDISLVHSMIPLGSCTMKLNSSSELAPITWKEFANIHPFVPLDQAQGYQQLFRELEKDLCELTGYDQVCFQPNSGAQGEYAGLATIRAYLNQKGEGHRTVCLIPKSAHGTNPASAHMAGMKIQPVEVDKYGNIDAVHLKAMVDKHKENLAAIMITYPSTNGVFEENISDVCDLIHQHGGQVYLDGANMNAQVGICRPGDFGSDVSHLNLHKTFCIPHGGGGPGMGPIGVKKHLAPFLPNHPVISLKRNEDACPVGTVSAAPWGSSSILPISWAYIKMMGGKGLKQATETAILNANYMAKRLETHYRILFRGARGYVGHEFILDTRPFKKSANIEAVDVAKRLQDYGFHAPTMSWPVAGTLMVEPTESEDKAELDRFCDAMISIRQEIADIEEGRIDPRVNPLKMSPHSLTCVTSSHWDRPYSREVAAFPLPFMKPENKFWPTIARIDDIYGDQHLVCTCPPMEVYESPFSEQKRASS

SEQ ID NO: 5409 - protein, 535 aa, Homo Sapiens [sequence omitted]

SEQ ID NO: 5410 - protein, 2201 aa, Homo Sapiens
MGAMTQLLAGVFLAFLALATEGGVLKKVIRHKRQSGVNATLPEENQPVVFNHVYNIKLPVGSQCSVDLESASGEKDLAPPSEPSESFQEHTVDGENQIVFTHRINIPRRACGCAAAPDVKELLSRLEELENLVSSLREQCTAGAGCCLQPATGRLDTRPFCSGRGNFSTEGCGCVCEPGWKGPNCSEPECPGNCHLRGRCIDGQCICDDGFTGEDCSQLACPSDCNDQGKCVNGVCICFEGYAGADCSREICPVPCSEEHGTCVDGLCVCHDGFAGDDCNKPLCLNNCYNRGRCVENECVCDEGFTGEDCSELICPNDCFDRGRCINGTCYCEEGFTGEDCGKPTCPHACHTQGRCEEGQCVCDEGFAGLDCSEKRCPADCHNRGRCVDGRCECDDGFTGADCGELKCPNGCSGHGRCVNGQCVCDEGYTGEDCSQLRCPNDCHSRGRCVEGKCVCEQGFKGYDCSDMSCPNDCHQHGRCVNGMCVCDDGYTGEDCRDRQCPRDCSNRGLCVDGQCVCEDGFTGPDCAELSCPNDCHGQGRCVNGQCVCHEGFMGKDCKEQRCPSDCHGQGRCVDGQCICHEGFTGLDCGQHSCPSDCNNLGQCVSGRCICNEGYSGEDCSEVSPPKDLVVTEVTEETVNLAWDNEMRVTEYLVVYTPTHEGGLEMQFRVPGDQTSTIIQELEPGVEYFIRVFAILENKKSIPVSARVATYLPAPEGLKFKSIKETSVEVEWDPLDIAFETWEIIFRNMNKEDEGEITKSLRRPETSYRQTGLAPGQEYEISLHIVKNNTRGPGLKRVTTTRLDAPSQIEVKDVTDTTALITWFKPLAEIDGIELTYGIKDVPGDRTTIDLTEDENQYSIGNLKPDTEYEVSLISRRGDMSSNPAKETFTTGLDAPRNLRRVSQTDNSITLEWRNGKAAIDSYRIKYAPISGGDHAEVDVPKSQQATTKTTLTGLRPGTEYGIGVSAVKEDKESNPATINAATELDTPKDLQVSETAETSLTLLWKTPLAKFDRYRLNYSLPTGQWVGVQLPRNTTSYVLRGLEPGQEYNVLLTAEKGRHKSKPARVKASTEQAPELENLTVTEVGWDGLRLNWTAADQAYEHFIIQVQEANKVEAARNLTVPGSLRAVDIPGLKAATPYTVSIYGVIQGYRTPVLSAEASTGETPNLGEVVVAEVGWDALKLNWTAPEGAYEYFFIQVQEADTVEAAQNLTVPGGLRSTDLPGLKAATHYTITIRGVTQDFSTTPLSVEVLTEEVPDMGNLTVTEVSWDALRLNWTTPDGTYDQFTIQVQEADQVEEAHNLTVPGSLRSMEIPGLRAGTPYTVTLHGEVRGHSTRPLAVEVVTEDLPQLGDLAVSEVGWDGLRLNWTAADNAYEHFVIQVQEVNKVEAAQNLTLPGSLRAVDIPGLEAATPYRVSIYGVIRGYRTPVLSAEASTAKEPEIGNLNVSDITPESFNLSWMATDGIFETFTIEIIDSNRLLETVEYNISGAERTAHISGLPPSTDFIVYLSGLAPSIRTKTISATATTEALPLLENLTISDINPYGFTVSWMASENAFDSFLVTVVDSGKLLDPQEFTLSGTQRKLELRGLITGIGYEVMVSGFTQGHQTKPLRAEIVTEAEPEVDNLLVSDATPDGFRLSWTADEGVFDNFVLKIRDTKKQSEPLEITLLAPERTRDLTGLREATEYEIELYGISKGRRSQTVSAIATTAMGSPKEVIFSDITENSATVSWRAPTAQVESFRITYVPITGGTPSMVTVDGTKTQTRLVKLIPGVEYLVSIIAMKGFEESEPVSGSFTTALDGPSGLVTANITDSEALARWQPAIATVDSYVISYTGEKVPEITRTVSGNTVEYALTDLEPATEYTLRIFAEKGPQKSSTITAKFTTDLDSPRDLTATEVQSETALLTWRPPRASVTGYLLVYESVDGTVKEVIVGPDTTSYSLADLSPSTHYTAKIQALNGPLRSNMIQTIFTTIGLLYPFPKDCSQAMLNGDTTSGLYTIYLNGDKAQALEVFCDMTSDGGGWIVFLRRKNGRENFYQNWKAYAAGFGDRREEFWLGLDNLNKITAQGQYELRVDLRDHGETAFAVYDKFSVGDAKTRYKLKVEGYSGTAGDSMAYHNGRSFSTFDKDTDSAITNCALSYKGAFWYRNCHRVNLMGRYGDNNHSQGVNWFHWKGHEHSIQFAEMKLRPSNFRNLEGRRKRA

SEQ ID NO: 5411 - protein, 198 aa, Homo Sapiens
MPLGLLWLGLALLGALHAQAQDSTSDLIPAPPLSKVPLQQNFQDNQFQGKWYVVGLAGNAILREDKDPQKMYATIYELKEDKSYNVTSVLFRKKKCDYWIRTFVPGCQPGEFTLGNIKSYPGLTSYLVRVVSTNYNQHAMVFFKKVSQNREYFKITLYGRTKELTSELKENFIRFSKYLGLPENHIVFPVPIDQCIDG

SEQ ID NO: 5412 - protein, 819 aa, Homo Sapiens
MGSGARFPSGTLRVRWLLLLGLVGPVLGAARPGFQQTSHLSSYEIITPWRLTRERREAPRPYSKQVSYVIQAEGKEHIIHLERNKDLLPEDFVVYTYNKEGTLITDHPNIQNHCHYRGYVEGVHNSSIALSDCFGLRGLLHLENASYGIEPLQNSSHFEHIIYRMDDVYKEPLKCGVSNKDIEKETAKDEEEEPPSMTQLLRRRRAVLPQTRYVELFIVVDKERYDMMGRNQTAVREEMILLANYLDSMYIMLNIRIVLVGLEIWTNGNLINIVGGAGDVLGNFVQWREKFLITRRRHDSAQLVLKKGFGGTAGMAFVGTVCSRSHAGGINVFGQITVETFASIVAHELGHNLGMNHDDGRDCSCGAKSCIMNSGASGSRNFSSCSAEDFEKLTLNKGGNCLLNIPKPDEAYSAPSCGNKLVDAGEECDCGTPKECELDPCCEGSTCKLKSFAECAYGDCCKDCRFLPGGTLCRGKTSECDVPEYCNGSSQFCQPDVFIQNGYPCQNNKAYCYNGMCQYYDAQCQVIFGSKAKAAPKDCFIEVNSKGDRFGNCGFSGNEYKKCATGNALCGKLQCENVQEIPVFGIVPAIIQTPSRGTKCWGVDFQLGSDVPDPGMVNEGTKCGAGKICRNFQCVDASVLNYDCDVQKKCHGHGVCNSNKNCHCENGWAPPNCETKGYGGSVDSGPTYNEMNTALRDGLLVFFFLIVPLIVCAIFIFIKRDQLWRSYFRKKRSQTYESDGKNQANPSRQPGSVPRHVSPVTPPREVPIYANRFAVPTYAAKQPQQFPSRPPPPQPKVSSQGNLIPARPAPAPPLYSSLT

SEQ ID NO: 5413 - protein, 528 aa, Homo Sapiens
MLGRSLREVSAALKQGQITPTELCQKCLSLIKKTKFLNAYITVSEEVALKQAEESEKRYKNGQSLGDLDGIPIAVKDNFSTSGIETTCASNMLKGYIPPYNATVVQKLLDQGALLMGKTNLDEFAMGSGSTDGVFGPVKNPWSYSKQYREKRKQNPHSENEDSDWLITGGSSGGSAAAVSAFTCYAALGSDTGGSTRNPAAHCGLVGFKPSYGLVSRHGLIPLVNSMDVPGILTRCVDDAAIVLGALAGPDPRDSTTVHEPINKPFMLPSLADVSKLCIGIPKEYLVPELSSEVQSLWSKAADLFESEGAKVIEVSLPHTSYSIVCYHVLCTSEVASNMARFDGLQYGHRCDIDVSTEAMYAATRREGFNDVVRGRILSGNFFLLKENYENYFVKAQKVRRLIANDFVNAFNSGVDVLLTPTTLSEAVPYLEFIKEDNRTRSAQDDIFTQAVNMAGLPAVSIPVALSNQGLPIGLQFIGRAFCDQQLLTVAKWFEKQVQFPVIQLQELMDDCSAVLENEKLASVSLKQ

SEQ ID NO: 5414 - protein, 1224 aa, Homo Sapiens
MEPLLLGRGLIVYLMFLLLKFSKAIEIPSSVQQVPTIIKQSKVQVAFPFDEYFQIECEAKGNPEPTFSWTKDGNPFYFTDHRIIPSNNSGTFRIPNEGHISHFQGKYRCFASNKLGIAMSEEIEFIVPSVPKFPKEKIDPLEVEEGDPIVLPCNPPKGLPPLHIYWMNIELEHIEQDERVYMSQKGDLYFANVEEKDSRNDYCCFAAFPRLRTIVQKMPMKLTVNSLKHANDSSSSTEIGSKANSIKQRKPKLLLPPTESGSESSITILKGEILLLECFAEGLPTPQVDWNKIGGDLPKGREAKENYGKTLKIENVSYQDKGNYRCTASNFLGTATHDFHVIVEEPPRWTKKPQSAVYSTGSNGILLCEAEGEPQPTIKWRVNGSPVDNHPFAGDVVFPREISFTNLQPNHTAVYQCEASNVHGTILANANIDVVDVRPLIQTKDGENYATVVGYSAFLHCEFFASPEAVVSWQKVEEVKPLEGRRYHIYENGTLQINRTTEEDAGSYSCWVENAIGKTAVTANLDIRNATKLRVSPKNPRIPKLHMLELHCESKCDSHLKHSLKLSWSKDGEAFEINGTEDGRIIIDGANLTISNVTLEDQGIYCCSAHTALDSAADITQVTVLDVPDPPENLHLSERQNRSVRLTWEAGADHNSNISEYIVEFEGNKEEPGRWEELTRVQGKKTTVILPLAPFVRYQFRVIAVNEVGRSQPSQPSDHHETPPAAPDRNPQNIRVQASQPKEMIIKWEPLKSMEQNGPGLEYRVTWKPQGAPVEWEEETVTNHTLRVMTPAVYAPYDVKVQAINQLGSGPDPQSVTLYSGEDYPDTAPVIHGVDVINSTLVKVTWSTVPKDRVHGRLKGYQINWWKTKSLLDGRTHPKEVNILRFSGQRNSGMVPSLDAFSEFHLTVLAYNSKGAGPESEPYIFQTPEGVPEQPTFLKVIKVDKDTATLSWGLPKKLNGNLTGYLLQYQIINDTYEIGELNDINITTPSKPSWHLSNLNATTKYKFYLRACTSQGCGKPITEESSTLGEGSKGIGKISGVNLTQKTHPVEVFEPGAEHIVRLMTKNWGDNDSIFQDVIETRGREYAGLYDDISTQGWFIGLMCAIALLTLLLLTVCFVKRNRGGKYSVKEKEDLHPDPEIQSVKDETFGEYSDSDEKPLKGSLRSLNRDMQPTESADSLVEYGEGDHGLFSEDGSFIGAYAGSKEKGSVESNGSSTATFPLRA

SEQ ID NO: 5415 - protein, 256 aa, Homo Sapiens
MFQTGGLIVFYGLLAQTMAQFGGLPVPLDQTLPLNVNPALPLSPTGLAGSLTNALSNGLLSGGLLGILENLPLLDILKPGGGTSGGLLGGLLGKVTSVIPGLNNIIDIKVTDPQLLELGLVQSPDGHRLYVTIPLGIKLQVNTPLVGASLLRLAVKLDITAEILAVRDKQERIHLVLGDCTHSPGSLQISLLDGLGPLPIQGLLDSLTGILNKVLPELVQGNVCPLVNEVLRGLDITLVHDIVNMLIHGLQFVIKV

SEQ ID NO: 5416 - protein, 201 aa, Homo Sapiens [sequence omitted]

SEQ ID NO: 5417 - protein, 231 aa, Homo Sapiens
MSGRSVRAETRSRAKDDIKRVMAAIEKVRKWEKKWVTVGDTSLRIYKWVPVTEPKVDDKNKNKKKGKDEKCGSEVTTPENSSSPGMMDMHDDNSNQSSIADASPIKQENSSNSSPAPEPNSAVPSDGTEAKVDEAQADGKEHPGAEDASDEQNSQSSMEHSMNSSEKVDRQPSGDSGLAAETSAISQVPRSRSQRGSQIGREPIGLSGDLEGVPPSKKMKLEASQQNSEEM

SEQ ID NO: 5418 - protein, 268 aa, Homo Sapiens
MGLSPSAPAVAVQASNASASPPSGCPMHEGKMKGCPVNTEPSGPTCEKKTYSVPAHQERAYEYVECPIRGTAAENKENLDPSNLMPPPNQTPAPDQPFALSTVREESSIPRADSEKKWVYPSEQMFWNAMLKKGWKWKDEDISQKDMYNIIRIHNQNNEQAWKEILKWEALHAAECPCGPSLIRFGGKAKEYSPRARIRSWMGYELPFDRHDWIINRCGTEVRYVIDYYDGGEVNKDYQFTILDVRPALDSLSAVWDRMKVAWWRWTS

SEQ ID NO: 5419 - protein, 498 aa, Homo Sapiens
MTVFLSFAFLAAILTHIGCSNQRRSPENSGRRYNRIQHGQCAYTFILPEHDGNCRESTTDQYNTNALQRDAPHVEPDFSSQKLQHLEHVMENYTQWLQKLENYIVENMKSEMAQIQQNAVQNHTATMLEIGTSLLSQTAEQTRKLTDVETQVLNQTSRLEIQLLENSLSTYKLEKQLLQQTNEILKIHEKNSLLEHKILEMEGKHKEELDTLKEEKENLQGLVTRQTYIIQELEKQLNRATTNNSVLQKQQLELMDTVHNLVNLCTKEGVLLKGGKREEEKPFRDCADVYQAGFNKSGIYTIYINNMPEPKKVFCNMDVNGGGWTVIQHREDGSLDFQRGWKEYKMGFGNPSGEYWLGNEFIFAITSQRQYMLRIELMDWEGNRAYSQYDRFHIGNEKQNYRLYLKGHTGTAGKQSSLILHGADFSTKDADNDNCMCKCALMLTGGWWFDACGPSNLNGMFYTAGQNHGKLNGIKWHYFKGPSYSLRSTTMMIRPLDF

SEQ ID NO: 5420 - protein, 1914 aa, Homo Sapiens
MGDVKLVASSHISKTSLSVDPSRVDSMPLTEAPAFILPPRNLCIKEGATAKFEGRVRGYPEPQVTWHRNGQPITSGGRFLLDCGIRGTFSLVIHAVHEEDRGKYTCEATNGSGARQVTVELTVEGSFAKQLGQPVVSKTLGDRFSASAVETRPSIWGECPPKFATKLGRVVVKEGQMGRFSCKITGRPQPQVTWLKGNVPLQPSARVSVSEKNGMQVLEIHGVNQDDVGVYTCLVVNGSGKASMSAELSIQGLDSANRSFVRETKATNSDVRKEVTNVISKESKLDSLEAAAKSKNCSSPQRGGSPPWAANSQPQPPRESKLESCKDSPRTAPQTPVLQKTSSSITLQAARVQPEPRAPGLGVLSPSGEERKRPAPPRPATFPTRQPGLGSQDVVSKAANRRIPMEGQRDSAFPKFESKPQSQEVKENQTVKFRCEVSGIPKPEVAWFLEGTPVRRQEGSIEVYEDAGSHYLCLLKARTRDSGTYSCTASNAQGQVSCSWTLQVERLAVMEVAPSFSSVLKDCAVIEGQDFVLQCSVRGTPVPRITWLLNGQPIQYARSTCEAGVAELHIQDALPEDHGTYTCLAENALGQVSCSAWVTVHEKKSSRKSEYLLPVAPSKPTAPIFLQGLSDLKVMDGSQVTMTVQVSGNPPPEVIWLHNGNEIQESEDFHFEQRGTQHSLWIQEVFPEDTGTYTCEAWNSAGEVRTQAVLTVQEPHDGTQPWFISKPRSVTASLGQSVLISCAIAGDPFPTVHWLRDGKALCKDTGHFEVLQNEDVFTLVLKKVQPWHAGQYEILLKNRVGECSCQVSLMLQNSSARALPRGREPASCEDLCGGGVGADGGGSDRYGSLRPGWPARGQGWLEEEDGEDVRGVLKRRVETRQHTEEAIRQQEVEQLDFRDLLGKKVSTKTLSEDDLKEIPAEQMDFRANLQRQVKPKTVSEEERKVHSPQQVDFRSVLAKKGTSKTPVPEKVPPPKPATPDFRSVLGGKKKLPAENGSSSAETLNAKAVESSKPLSNAQPSGPLKPVGNAKPAETLKPMGNAKPAETLKPMGNAKPDENLKSASKEELKKDVKNDVNCKRGHAGTTDNEKRSESQGTAPAFKQKLQDVHVAEGKKLLLQCQVSSDPPATIIWTLNGKTLKTTKFIILSQEGSLCSVSIEKALPEDRGLYKCVAKNDAGQAECSCQVTVDDAPASENTKAPEMKSRRPKSSLPPVLGTESDATVKKKPAPKTPPKAAMPPQIIQFPEDQKVRAGESVELFGKVTGTQPITCTWMKFRKQIQESEHMKVENSENGSKLTILAARQEHCGCYTLLVENKLGSRQAQVNLTVVDKPDPPAGTPCASDIRSSSLTLSWYGSSYDGGSAVQSYSIEIWDSANKTWKELATCRSTSFNVQDLLPDHEYKFRVRAINVYGTSEPSQESELTTVGEKPEEPKDEVEVSDDDEKEPEVDYRTVTINTEQKVSDFYDIEERLGSGKFGQVFRLVEKKTRKVWAGKFFKAYSAKEKENIRQEISIMNCLHHPKLVQCVDAFEEKANIVMVLEIVSGGELFERIIDEDFELTERECIKYMRQISEGVEYIHKQGIVHLDLKPENIMCVNKTGTRIKLIDFGLARRLENAGSLKVLFGTPEFVAPEVINYEPIGYATDMWSIGVICYILVSGLSPFMGDNDNETLANVTSATWDFDDEAFDEISDDAKDFISNLLKKDMKNRLDCTQCLQHPWLMKDTKNMEAKKLSKDRMKKYMARRKWQKTGNAVRAIGRLSSMAMISGLSGRKSSTGSPTSPLNAEKLESEEDVSQAFLEAVAEEKPHVKPYFSKTIRDLEVVEGSAARFDCKIEGYPDPEVVWFKDDQSIRESRHFQIDYDEDGNCSLIISDVCGDDDAKYTCKAVNSLGEATCTAELIVETMEEGEGEGEEEEE

SEQ ID NO: 5421 - protein, 544 aa, Homo Sapiens
MSSFSYEPYYSTSYKRRYVETPRVHISVRSGYSTARSAYSSYSAPVSSSLSVRRSYSSSSGSLMPSLENLDLSQVAAISNDLKSIRTQEKAQLQDLNDRFASFIERVHELEQQNKVLEAELLVLRQKHSEPSRFRALYEQEIRDLRLAAEDATTNEKQALRGEREEGLEETLRNLQARYEEEVLSREDAEGRLMERRKGADEAALARAELEKRIDSLMDEISFLKKVHEEEIAELQAQIQYAQISVEMDVTKPDLSAALKDIRAQYEKLAAKNMQNAEEWFKSRFTVLTESAAKNTDAVRAAKDEVSESRRLLKAKTLEIEACRGMNEALEKQLQELEDKQNADISAMQDTINKLENELRTTKSEMARYLKEYQDLLNVKMALDIEIAAYRKLLEGEETRLSFTSVGSITSGYSQSSQVFGRSAYGGLQTSSYLMSTRSFPSYYTSHVQEEQTEVEETIEASKAEEAKDEPPSEGEAEEEEKDKEEAEEEEAAEEEEAAKEESEEAKEEEEGGEGEEGEETKEAEEEEKKVEGAGEEQAAKKKD

SEQ ID NO: 5422 - protein, 749 aa, Homo Sapiens
MSFIDPYQHIIVEHQYSHKFTVVVLRATKVTKGAFGDMLDTPDPYVELFISTTPDSRKRTRHFNNDINPVWNETFEFILDPNQENVLEITLMDANYVMDETLGTATFTVSSMKVGEKKEVPFIFNQVTEMVLEMSLEVCSCPDLRFSMALCDQEKTFRQQRKEHIRESMKKLLGPKNSEGLHSARDVPVVAILGSGGGFRAMVGFSGVMKALYESGILDCATYVAGLSGSTWYMSTLYSHPDFPEKGPEEINEELMKNVSHNPLLLLTPQKVKRYVESLWKKKSSGQPVTFTDIFGMLIGETLIHNRMNTTLSSLKEKVNTAQCPLPLFTCLHVKPDVSELMFADWVEFSPYEIGMAKYGTFMAPDLFGSKFFMGTVVKKYEENPLHFLMGVWGSAFSILFNRVLGVSGSQSRGSTMEEELENITTKHIVSNDSSDSDDESHEPKGTENEDAGSDYQSDNQASWIHRMIMALVSDSALFNTREGRAGKVHNFMLGLNLNTSYPLSPLSDFATQDSFDDDELDAAVADPDEFERIYEPLDVKSKKIHVVDSGLTFNLPYPLILRPQRGVDLIISFDFSARPSDSSPPFKELLLAEKWAKMNKLPFPKIDPYVFDREGLKECYVFKPKNPDMEKDCPTIIHFVLANINFRKYKAPGVPRETEEEKEIADFDIFDDPESPFSTFNFQYPNQAFKRLHDLMHFNTLNNIDVIKEAMVESIEYRRQNPSRCSVSLSNVEARRFFNKEFLSKPKA

SEQ ID NO: 5423 - protein, 547 aa, Homo Sapiens
MDIIFGRNRKEQLEPVRAKVTGKIPAWLQGTLLRNGPGMHTVGESRYNHWFDGLALLHSFTIRDGEVYYRSKYLRSDTYNTNIEANRIVVSEFGTMAYPDPCKNIFSKAFSYLSHTIPDFTDNCLINIMKCGEDFYATSETNYIRKINPQTLETLEKVDYRKYVAVNLATSHPHYDEAGNVLNMGTSIVEKGKTKYVIFKIPATVPEGKKQGKSPWKHTEVFCSIPSRSLLSPSYYHSFGVTENYVIFLEQPFRLDILKMATAYIRRMSWASCLAFHREEKTYIHIIDQRTRQPVQTKFYTGAMVVFHHVNAYEEDGCIVFDVIAYEDNSLYQLFYLANLNQDFKENSRLTSVPTLRRFAVPLHVDKNAEVGTNLIKVASTTATALKEEDGQVYCQPEFLYEGLELPRVNYAHNGKQYRYVFATGVQWSPIPTKIIKYDILTKSSLKWREDDCWPAEPLFVPAPGAKDEDDGVILSAIVSTDPQKLPFLLILDAKSFTELARASVDVDMHMDLHGLFITDMDWDTKKQAASEEQRDRASDCHGAPLT

SEQ ID NO: 5424 - protein, 679 aa, Homo Sapiens
MCRGCGCLPPDAPCPTLCSRNPAMVNEARGNSSLNPCLEGSASSGSESSKDSSRCSTPGLDPERHERLREKMRRRLESGDKWFSLEFFPPRTAEGAVNLISRFDRMAAGGPLYIDVTWHPAGDPGSDKETSSMMIASTAVNYCGLETILHMTCCRQRLEEITGHLHKAKQLGLKNIMALRGDPIGDQWEEEEGGFNYAVDLVKHIRSEFGDYFDICVAGYPKGHPEAGSFEADLKHLKEKVSAGADFIITQLFFEADTFFRFVKACTDMGITCPIVPGIFPIQGYHSLRQLVKLSKLEVPQEIKDVIEPIKDNDAAIRNYGIELAVSLCQELLASGLVPGLHFYTLNREMATTEVLKRLGMWTEDPRRPLPWALSAHPKRREEDVRPIFWASRPKSYIYRTQEWDEFPNGRWGNSSSPAFGELKDYYLFYLKSKSPKEELLKMWGEELTSEASVFEVFVLYLSGEPNRNGHKVTCLPWNDEPLAAETSLLKEELLRVNRQGILTINSQPNINGKPSSDPIVGWGPSGGYVFQKAYLEFFTSRETAEALLQVLKKYELRVNYHLVNVKGENITNAPELQPNAVTWGIFPGREIIQPTVVDPVSFMFWKDEAFALWIERWGKLYEEESPSRTIIQYIHDNYFLVNLVDNDFPLDNCLWQVVEDTLELLNRPTQNARETEAP

SEQ ID NO: 5425 - protein, 466 aa, Homo Sapiens
MVMEKPSPLLVGREFVRQYYTLLNQAPDMLHRFYGKNSSYVHGGLDSNGKPADAVYGQKEIHRKVMSQNFTNCHTKIRHVDAHATLNDGVVVQVMGLLSNNNQALRRFMQTFVLAPEGSVANKFYVHNDIFRYQDEVFGGFVTEPQEESEEEVEEPEERQQTPEVVPDDSGTFYDQAVVSNDMEEHLEEPVAEPEPDPEPEPEQEPVSEIQEEKPEPVLEETAPEDAQKSSSPAPADIAQTVQEDLRTFSWASVTSKNLPPSGAVPVTGIPPHVVKVPASQPRPESKPESQIPPQRPQRDQRVREQRINIPPQRGPRPIREAGEQGDIEPRRMVRHPDSHQLFIGNLPHEVDKSELKDFFQSYGNVVELRINSGGKLPNFGFVVFDDSEPVQKVLSNRPIMFRGEVRLNVEEKKTRAAREGDRRDNRLRGPGGPRGGLGGGMRGPPRGGMVQKPGFGVGRGLAPRQ

SEQ ID NO: 5426 - protein, 684 aa, Homo Sapiens
MARHRNVRGYNYDEDFEDDDLYGQSVEDDYCISPSTAAQFIYSRRDKPSVEPVEEYDYEDLKESSNSVSNHQLSGFDQARLYSCLDHMREVLGDAVPDEILIEAVLKNKFDVQKALSGVLEQDRVQSLKDKNEATVSTGKIAKGKPVDSQTSRSESEIVPKVAKMTVSGKKQTMGFEVPGVSSEENGHSFHTPQKGPPIEDAIASSDVLETASKSANPPHTIQASEEQSSTPAPVKKSGKLRQQIDVKAELEKRQGGKQLLNLVVIGHVDAGKSTLMGHMLYLLGNINKRTMHKYEQESKKAGKASFAYAWVLDETGEERERGVTMDVGMTKFETTTKVITLMDAPGHKDFIPNMITGAAQADVAVLVVDASRGEFEAGFETGGQTREHGLLVRSLGVTQLAVAVNKMDQVNWQQERFQEITGKLGHFLKQAGFKESDVGFIPTSGLSGENLITRSQSSELTKWYKGLCLLEQIDSFKPPQRSIDKPFRLCVSDVFKDQGSGFCITGKIEAGYIQTGDRLLAMPPNETCTVKGITLHDEPVDWAAAGDHVSLTLVGMDIIKINVGCIFCGPKVPIKACTRFRARILIFNIEIPITKGFPVLLHYQTVSEPAVIKRLISVLNKSTGEVTKKKPKFLTKGQNALVELQTQRPIALELYKDFKELGRFMLRYGGSTIAAGVVTEIKE

SEQ ID NO: 5427 - protein, 942 aa, Homo Sapiens
MASDAVQSEPRSWSLLEQLGLAGADLAAPGVQQQLELERERLRREIRKELKLKEGAENLRRATTDLGRSLGPVELLLRGSSRRLDLLHQQLQELHAHVVLPDPAATHDGPQSPGAGGPTCSATNLSRVAGLEKQLAIELKVKQGAENMIQTYSNGSTKDRKLLLTAQQMLQDSKTKIDIIRMQLRRALQADQLENQAAPDDTQGSPDLGAVELRIEELRHHFRVEHAVAEGAKNVLRLLSAAKAPDRKAVSEAQEKLTESNQKLGLLREALERRLGELPADHPKGRLLREELAAASSAAFSTRLAGPFPATHYSTLCKPAPLTGTLEVRVVGCRDLPETIPWNPTPSMGGPGTPDSRPPFLSRPARGLYSRSGSLSGRSSLKAEAENTSEVSTVLKLDNTVVGQTSWKPCGPNAWDQSFTLELERARELELAVFWRDQRGLCALKFLKLEDFLDNERHEVQLDMEPQGCLVAEVTFRNPVIERIPRLRRQKKIFSKQQGKAFQRARQMNIDVATWVRLLRRLIPNATGTGTFSPGASPGSEARTTGDISVEKLNLGTDSDSSPQKSSRDPPSSPSSLSSPIQESTAPELPSETQETPGPALCSPLRKSPLTLEDFKFLAVLGRGHFGKVLLSEFRPSGELFAIKALKKGDIVARDEVESLMCEKRILAAVTSAGHPFLVNLFGCFQTPEHVCFVMEYSAGGDLMLHIHSDVFSEPRAIFYSACVVLGLQFLHEHKIVYRDLKLDNLLLDTEGYVKIADFGLCKEGMGYGDRTSTFCGTPEFLAPEVLTDTSYTRAVDWWGLGVLLYEMLVGESPFPGDDEEEVFDSIVNDEVRYPRFLSAEAIGIMRRLLRRNPERRLGSSERDAEDVKKQPFFRTLGWEALLARRLPPPFVPTLSGRTDVSNFDEEFTGEAPTLSPPRDARPLTAAEQAAFLDFDFVAGGC

SEQ ID NO: 5428 - protein, 379 aa, Homo Sapiens
HEVKVLDKATVPIIKLTDSFTEVKVDISFNVQNGVRAADLIKDFTKKYPVLPYLVLVLKQFLLQRDLNEVFTGGIGSYSLFLMAVSFLQLHPREDACIPNTNYGVLLIEFFELYGRHFNYLKTGIRIKDGGSYVAKDEVQKNMLDGYRPSMLYIEDPLQPGNDVGRSSYGAMQVKQAFDYAYVVLSHAVSPIAKYYPNNETESILGRIIRVTDEVATYRDWISKQWGLKNRPEPSCNGNGVTLIVDTQQLDKCNNNLSEENEALGKCRSKTSESLSKHSSNSSSGPVSSSSATQSSSSDVDSDATPCKTPKQLLCRPSTGNRVGSQDVSLESSQAVGKMQSTQTTNTSNSTNKSQHGSARLFRSSSKGFQGTTQTSHGS

SEQ ID NO: 5429 - protein, 181 aa, Homo Sapiens
MLLVDADQPEPMRSGARELALFLTPEPGAEAKEVEETIEGMLLRLEEFCSLADLIRSDTSQILEENIPVLKAKLTEMRGIYAKVDRLEAFVKMVGHHVAFLEADVLQAERDHGAFPQALRRWLGSAGLPSFRNVECSGTIPARCNLRLPGSSDSPASASQVAGITEVTCTGARDVRAAHTV

SEQ ID NO: 5430 - protein, 194 aa, Homo Sapiens
MTENSTSAPAAKPKRAKASKKSTDHPKYSDMIVAAIQAEKNRAGSSRQSIQKYIKSHYKVGENADSQIKLSIKRLVTTGVLKQTKGVGASGSFRLAKSDEPKKSVAFKKTKKEIKKVATPKKASKPKKAASKAPTKKPKATPVKKAKKKLAATPKKAKKPKTVKAKPVKASKPKKAKPVKPKAKSSAKRAGKKK

SEQ ID NO: 5431 - protein, 332 aa, Homo Sapiens
MVFRSPLDLYSSHFLLPNFADSHHRSILLASSGGGNGAGGGGGAGGGSGGGNGAGGGGAGGAGGGGGGGSRAPPEELSMFQLPTLNFSPEQVASVCETLEETGDIERLGRFLWSLPVAPGACEAINKHESILRARAVVAFHTGNFRDLYHILENHKFTKESHGKLQAMWLEAHYQEAEKLRGRPLGPVDKYRVRKKFPLPRTIWDGEQKTHCFKERTRSLLREWYLQDPYPNPSKKRELAQATGLTPTQVGNWFKNRRQRDRAAAAKNRLQHQAIGPSGMRSLAEPGCPTHGSAESPSTAASPTTSVSSLTERADTGTSILSVTSSDSECDV

SEQ ID NO: 5432 - protein, 696 aa, Homo Sapiens
MKFAEHLSAHITPEWRKQYIQYEAFKDMLYSAQDQAPSVEVTDEDTVKRYFAKFEEKFFQTCEKELAKINTFYSEKLAEAQRRFATLQNELQSSLDAQKESTGVTTLRQRRKPVFHLSHEERVQHRNIKDLKLAFSEFYLSLILLQNYQNLNFTGFRKILKKHDKILETSRGADWRVAHVEVAPFYTCKKINQLISETEAVVTNELEDGDRQKAMKRLRVPPLGAAQPAPAWTTFRVGLFCGIFIVLNITLVLAAVFKLETDRSIWPLIRIYRGGFLLIEFLFLLGINTYGWRQAGVNHVLIFELNPRSNLSHQHLFEIAGFLGILWCLSLLACFFAPISVIPTYVYPLALYGFMVFFLINPTKTFYYKSRFWLLKLLFRVFTAPFHKVGFADFWLADQLNSLSVILMDLEYMICFYSLELKWDESKGLLPNNSEESGICHKYTYGVRAIVQCIPAWLRFIQCLRRYRDTKRAFPHLVNAGKYSTTFFMVTFAALYSTHKERGHSDTMVFFYLWIVFYIISSCYTLIWDLKMDWGLFDKNAGENTFLREEIVYPQKAYYYCAIIEDVILRFAWTIQISITSTTLLPHSGDIIATVFAPLEVFRRFVWNFFRLENEHLNNCGEFRAVRDISVAPLNADDQTLLEQMMDQDDGVRNRQKNRSWKYNQSISLRRPRLASQSKARDTKVLIEDTDDEANT

SEQ ID NO: 5433 - protein, 1406 aa, Homo Sapiens
GTGVVPRSWPRAGGRRRRLPACYGMDEEENHYVSQLREVYSSCDTTGTGFLDRQELTQLCLKLHLEQQLPVLLQTLLGNDHFARVNFEEFKEGFVAVLSSNAGVRPSDEDSSSLESAASSAIPPKYVNGSKWYGRRSRPELCDAATEARRVPEQQTQASLKSHLWRSASLESVESPKSDEEAESTKEAQNELFEAQGQLQTWDSEDFGSPQKSCSPSFDTPESQIRGVWEELGVGSSGHLSEQELAVVCQSVGLQGLEKEELEDLFNKLDQDGDGKVSLEEFQLGLFSHEPALLLESSTRVKPSKAWSHYQVPEESGCHTTTTSSLVSLCSSLRLFSSIDDGSGFAFPDQVLAMWTQEGIQNGREILQSLDFSVDEKVNLLELTWALDNELMTVDSAVQQAALACYHQELSYQQGQVEQLARERDKARQDLERAEKRNLEFVKEMDDCHSTLEQLTEKKIKHLEQGYRERLSLLRSEVEAERELFWEQAHRQRAALEWDVGRLQAEEAGLREKLTLALKENSRLQKEIVEVVEKLSDSERLALKLQKDLEFVLKDKLEPQSAELLAQEERFAAVLKEYELKCRDLQDRNDELQAELEGLWARLPKNRHSPSWSPDGRRRQLPGLGPAGISFLGNSAPVSIETELMMEQVKEHYQDLRTQLETKVNYYEREIAALKRNFEKERKDMEQARRREVSVLEGQKADLEELHEKSQEVIWGLQEQLQDTARGPEPEQMGLAPCCTQALCGLALRHHSHLQQIRREAEAELSGELSGLGALPARRDLTLELEEPPQGPLPRGSQRSEQLELERALKLQPCASEKRAQMCVSLALEEEELELARGKRVDGPSLEAEMQALPKDGLVAGSGQEGTRGLLPLRPGCGERPLAWLAPGDGRESEEAAGAGPRRRQAQDTEATQSPAPAPAPASHGPSERWSRMQPCGVDGDIVPKEPEPFGASAAGLEQPGARELPLLGTERDASQTQPRMWEPPLRPAASCRGQAERLQAIQEERARSWSRGTQEQASEQQARAEGALEPGCHKHSVEVARRGSLPSHLQLADPQGSWQEQLAAPEEGETKIALEREKDDMETKLLHLEDVVRALEKHVDLRENDRLEFHRLSEENTLLKNDLGRVRQELEAAESTHDAQRKEIEVLKKDKEKACSEMEVLNRQNQNYKDQLSQLNVRVLQLGQEASTHQAQNEEHRVTIQMLTQSLEEVVRSGQQQSDQIQKLRVELECLNQEHQSLQLPWSELTQTLEESQDQVQGAHLRLRQAQAQHLQEVRLVPQDRVAELHRLLSLQGEQARRRLDAQREEHEKQLKATEERVEEAEMILKNMEMLLQEKVDKLKEQFEKNTKSDLLLKELYVENAHLVRALQATEEKQRGAEKQSRLLEEKVRALNKLVSRIAPAALSV

SEQ ID NO: 5434 - protein, 835 aa, Homo Sapiens
MAASAAAASAAAASAASGSPGPGEGSAGGEKRSTAPSAAASASASAAASSPAGGGAEALELLEHCGVCRERLRPEREPRLLPCLHSACSACLGPAAPAAANSSGDGGAAGDGTVVDCPVCKQQCFSKDIVENYFMRDSGSKAATDAQDANQCCTSCEDNAPATSYCVECSEPLCETCVEAHQRVKYTKDHTVRSTGPAKSRDGERTVYCNVHKHEPLVLFCESCDTLTCRDCQLNAHKDHQYQFLEDAVRNQRKLLASLVKRLGDKHATLQKSTKEVRSSIRQVSDVQKRVQVDVKMAILQIMKELNKRGRVLVNDAQKVTEGQQERLERQHWTMTKIQKHQEHILRFASWALESDNNTALLLSKKLIYFQLHRALKMIVDPVEPHGEMKFQWDLNAWTKSAEAFGKIVAERPGTNSTGPAPMAPPRAPGPLSKQGSGSSQPMEVQEGYGFGSGDDPYSSAEPHVSGVKRSRSGEGEVSGLMRKVPRVSLERLDLDLTADSQPPVFKVFPGSTTEDYNLIVIERGAAAAATGQPGTAPAGTPGAPPLAGMAIVKEEETEAAIGAPPTATEGPETKPVLMALAEGPGAEGPRLASPSGSTSSGLEVVAPEGTSAPGGGPGTLDDSATICRVCQKPGDLVMCNQCEFCFHLDCHLPALQDVPGEEWSCSLCHVLPDLKEEDGSLSLDGADSTGVVAKLSPANQRKCERVLLALFCHEPCRPLHQLATDSTFSLDQPGGTLDLTLIRARLQEKLSPPYSSPQEFAQDVGRMFKQFNKLTEDKADVQSIIGLQRFFETRMNEAFGDTKFSAVLVEPPPMSLPGAGLSSQELSGGPGDGP

SEQ ID NO: 5435 - protein, 502 aa, Homo Sapiens [sequence omitted]

SEQ ID NO: 5436 - protein, 252 aa, Homo Sapiens
GTSYKCLCDPGYHGLYCEEEYNECLSAPCLNAATCRDLVNGYECVCLAEYKGTHCELYKDPCANVSCLNGATCDSDGLNGTCICAPGFTGEECDIDINECDSNPCHHGGSCLDQPNGYNCHCPHGWVGANCEIHLQWKSGHMAESLTNMPRHSLYIIIGALCVAFILMLIILIVGICRISRIEYQGSSRPAYEEFYNCRSIDSEFSNAIASIRHARFGKKSRPAMYDVSPIAYEDYSPDDKPLVTLIKTKDL

SEQ ID NO: 5437 - protein, 238 aa, Homo Sapiens
MRQSGASQPLLINMYLPDPVGDGLFKDGKNPSWGPLSPAVQKGSGQIQLWQFLLELLADRANAGCIAWEGGHGEFKLTDPDEVARRWGERKSKPNMNYDKLSRALRYYYDKNIMSKVHGKRYAYRFDFQGLAQACQPPPAHAHAAAAAAAAAAAAQDGALYKLPAGLAPLPFPGLSKLNLMAASAGVAPAGFSYWPGPGPAATAAAATAALYPSPSLQPPPGPFGAVAAASHLGGHYH

SEQ ID NO: 5438 - protein, 197 aa, Homo Sapiens
MQRWKAAALASVLCSSVLSIWMCREGLLLSHRLGPALVPLHRLPRTLDARIARLAQYRALLQGAPDAMELRELTPWAGRPPGPRRRAGPRRRRARARLGARPCGLRELEVRVSELGLGYASDETVLFRYCAGACEAAARVYDLGLRRLRQRRRLRRERVRAQPCCRPTAYEDEVSFLDAHSRYHTVHELSARECACV

SEQ ID NO: 5439 - protein, 93 aa, Homo Sapiens
MNAKVVVVLVLVLTALCLSDGKPVSLSYRCPCRFFESHVARANVKHLKILNTPNCALQIVARLKNNNRQVCIDPKLKWIQEYLEKALNKRFKM

SEQ ID NO: 5440 - protein, 608 aa, Homo Sapiens
MSQEGDYGRWTISSSDESEEEKPKPDKPSTSSLLCARQGAANEPRYTCSEAQKAAHKRKISPVKFSNTDSVLPPKRQKSGSQEDLGWCLSSSDDELQPEMPQKQAEKVVIKKEKDISAPNDGTAQRTENHGAPACHRLKEEEDEYETSGEGQDIWDMLDKGNPFQFYLTRVSGVKPKYNSGALHIKDILSPLFGTLVSSAQFNYCFDVDWLVKQYPPEFRKKPILLVHGDKREAKAHLHAQAKPYENISLCQAKLDIAFGTHHTKMMLLLYEEGLRVVIHTSNLIHADWHQKTQGIWLSPLYPRIADGTHKSGESPTHFKADLISYLMAYNAPSLKEWIDVIHKHDLSETNVYLIGSTPGRFQGSQKDNWGHFRLKKLLKDHASSMPNPESWPVVGQFSSVGSLGADESKWLCSEFKESMLTLGKESKTPGKSSVPLYLIYPSVENVRTSLEGYPAGGSLPYSIQTAEKQNWLHSYFHKWSAETSGRSNAMPHIKTYMRPSPDFSKIAWFLVTSANLSKAAWGALEKNGTQLMIRSYELGVLFLPSAFGLDSFKVKQKFFAGSQEPMATFPVPYDLPPELYGSKDRPWIWNIPYVKAPDTHGNMWVPS

SEQ ID NO: 5441 - protein, 979 aa, Homo Sapiens
MALFAVFQTTFFLTLLSLRTYQSEVLAERLPLTPVSLKVSTNSTRQSLHLQWTVHNLPYHQELKMVFQIQISRIETSNVIWVGNYSTTVKWNQVLHWSWESELPLECATHFVRIKSLVDDAKFPEPNFWSNWSSWEEVSVQDSTGQDILFVFPKDKLVEEGTNVTICYVSRNIQNNVSCYLEGKQIHGEQLDPHVTAFNLNSVPFIRNKGTNIYCEASQGNVSEGMKGIVLFVSKVLEEPKDFSCETEDFKTLHCTWDPGTDTALGWSKQPSQSYTLFESFSGEKKLCTHKNWCNWQITQDSQETYNFTLIAENYLRKRSVNILFNLTHRVYLMNPFSVNFENVNATNAIMTWKVHSIRNNFTYLCQIELHGEGKMMQYNVSIKVNGEYFLSELEPATEYMARVRCADASHFWKWSEWSGQNFTTLEAAPSEAPDVWRIVSLEPGNHTVTLFWKPLSKLHANGKILFYNVVVENLDKPSSSELHSIPAPANSTKLILDRCSYQICVIANNSVGASPASVIVISADPENKEVEEERIAGTEGGFSLSWKPQPGDVIGYVVDWCDHTQDVLGDFQWKNVGPNTTSTVISTDAFRPGVRYDFRIYGLSTKRIACLLEKKTGYSQELAPSDNPHVLVDTLTSHSFTLSWKDYSTESQPGFIQGYHVYLKSKARQCHPRFEKAVLSDGSECCKYKIDNPEEKALIVDNLKPESFYEFFITPFTSAGEGPSATFTKVTTPDEHSSMLIHILLPMVFCVLLIMVMCYLKSQWIKETCYPDIPDPYKSSILSLIKFKENPHLIIMNVSDCIPDAIEVVSKPEGTKIQFLGTRKSLTETELTKPNYLYLLPTEKNHSGPGPCICFENLTYNQAASDSGSCGHVPVSPKAPSMLGLMTSPENVLKALEKNYMNSLGEIPAGETSLNYVSQLASPMFGDKDSLPTNPVEAPHCSEYKMQMAVSLRLALPPPTENSSLSSITLLDPGEHYC

SEQ ID NO: 5442 - protein, 157 aa, Homo Sapiens
TAVGKLLLGILADFKWINTLYLYVATLIIMGLALCAIPFAKSYVTLALLSGILGFLTGNWSIFPYVTTKTVGIEKLAHAYGILMFFAGLGNSLGPPIVGWFYDWTQTYDIAFYFSGFCVLLGGFILLLAALPSWDTCNKQLPKPAPTTFLYKVASNV

SEQ ID NO: 5443 - protein, 280 aa, Homo Sapiens
MAEKFDCHYCRDPLQGKKYVQKDGHHCCLKCFDKFCANTCVECRKPIGADSKEVHYKNRFWHDTCFRCAKCLQPLANETFVAKDNKILCNKCTTREDFPKCKGCFKAIVAGDQNVEYKGTVWHKDCFTCSNCKQVIGTGSFFPKGEDFYCVTCHETKLAKHCVKCNKAITSGGITYQDQPWHADCFVCVTCSKKLAGQRFTAVEDQYYCVDCYKNFVAKKCAGCKNPITGFGKGSSVVAYEGQSWHDYCFHCKKCSVNLANKRFVFHQEQVYCPDCAKKL

SEQ ID NO: 5444 - protein, 454 aa, Homo Sapiens
MCAAQMPPLAHIFRGTFVHSTWTCPMEVLRDHLLGVSDSGKIVFLEEASQQEKLAKEWCFKPCEIRELSHHEFFMPGLVDTHIHASQYSFAGSSIDLPLLEWLTKYTFPAEHRFQNIDFAEEVYTRVVRRTLKNGTTTACYFATIHTDSSLLLADITDKFGQRAFVGKVCMDLNDTFPEYKETTEESIKETERFVSEMLQKNYSRVKPIVTPRFSLSCSETLMGELGNIAKTRDLHIQSHISENRDEVEAVKNLYPSYKNYTSVYDKNNLLTNKTVMAHGCYLSAEELNVFHERGASIAHCPNSNLSLSSGFLNVLEVLKHEVKIGLGTDVAGGYSYSMLDAIRRAVMVSNILLINKVNEKSLTLKEVFRLATLGGSQALGLDGEIGNFEVGKEFDAILINPKASDSPIDLFYGDFFGDISEAVIQKFLYLGDDRNIEEVYVGGKQVVPFSSSV

SEQ ID NO: 5445 - protein, 1367 aa, Homo Sapiens
MKSGSGGGSPTSLWGLLFLSAALSLWPTSGEICGPGIDIRNDYQQLKRLENCTVIEGYLHILLISKAEDYRSYRFPKLTVITEYLLLFRVAGLESLGDLFPNLTVIRGWKLFYNYALVIFEMTNLKDIGLYNLRNITRGAIRIEKNADLCYLSTVDWSLILDAVSNNYIVGNKPPKECGDLCPGTMEEKPMCEKTTINNEYNYRCWTTNRCQKMCPSTCGKRACTENNECCHPECLGSCSAPDNDTACVACRHYYYAGVCVPACPPNTYRFEGWRCVDRDFCANILSAESSDSEGFVIHDGECMQECPSGFIRNGSQSMYCIPCEGPCPKVCEEEKKTKTIDSVTSAQMLQGCTIFKGNLLINIRRGNNIASELENFMGLIEVVTGYVKIRHSHALVSLSFLKNLRLILGEEQLEGNYSFYVLDNQNLQQLWDWDHRNLTIKAGKMYFAFNPKLCVSEIYRMEEVTGTKGRQSKGDINTRNNGERASCESDVLHFTSTTTSKNRIIITWHRYRPPDYRDLISFTVYYKEAPFKNVTEYDGQDACGSNSWNMVDVDLPPNKDVEPGILLHGLKPWTQYAVYVKAVTLTMVENDHIRGAKSEILYIRTNASVPSIPLDVLSASNSSSQLIVKWNPPSLPNGNLSYYIVRWQRQPQDGYLYRHNYCSKDKIPIRKYADGTIDIEEVTENPKTEVCGGEKGPCCACPKTEAEKQAEKEEAEYRKVFENFLHNSIFVPRPERKRRDVMQVANTTMSSRSRNTTAADTYNITDPEELETEYPFFESRVDNKERTVISNLRPFTLYRIDIHSCNHEAEKLGCSASNFVFARTMPAEGADDIPGPVTWEPRPENSIFLKWPEPENPNGLILMYEIKYGSQVEDQRECVSRQEYRKYGGAKLNRLNPGNYTARIQATSLSGNGSWTDPVFFYVQAKTGYENFIHLIIALPVAVLLIVGGLVIMLYVFHRKRNNSRLGNGVLYASVNPEYFSAADVYVPDEWEVAREKITMSRELGQGSFGMVYEGVAKGVVKDEPETRVAIKTVNEAASMRERIEFLNEASVMKEFNCHHVVRLLGVVSQGQPTLVIMELMTRGDLKSYLRSLRPEMENNPVLAPPSLSKMIQMAGEIADGMAYLNANKFVHRDLAARNCMVAEDFTVKIGDFGMTRDIYETDYYRKGGKGLLPVRWMSPESLKDGVFTTYSDVWSFGVVLWEIATLAEQPYQGLSNEQVLRFVMEGGLLDKPDNCPDMLFELMRMCWQYNPKMRPSFLEIISSIKEEMEPGFREVSFYYSEENKLPEPEELDLEPENMESVPLDPSASSSSLPLPDRHSGHKAENGPGPGVLVLRASFDERQPYAHMNGGRKNERALPLPQSSTC

SEQ ID NO: 5446 - protein, 677 aa, Homo Sapiens
AGADGPGGMMRLRGSGMLRDLLLRSPAGVSATLRRAQPLVTLCRRPRGGGRPAAGPAAAARLHPWWGGGGWPAEPLARGLSSSPSEILQELGKGSTHPQPGVSPPAAPAAPGPKDGPGETDAFGNSEGKELVASGENKIKQGLLPSLEDLLFYTIAEGQEKIPVHKFITALKSTGLRTSDPRLKECMDMLRLTLQTTSDGVMLDKDLFKKCVQSNIVLLTQAFRRKFVIPDFMSFTSHIDELYESAKKQSGGKVADYIPQLAKFSPDLWGVSVCTVDGQRHSTGDTKVPFCLQSCVKPLKYAIAVNDLGTEYVHRYVGKEPSGLRFNKLFLNEDDKPHNPMVNAGAIVVTSLIKQGVNNAEKFDYVMQFLNKMAGNEYVGFSNATFQSERESGDRNFAIGYYLKEKKCFPEGTDMVGILDFYFQLCSIEVTCESASVMAATLANGGFCPITGERVLSPEAVRNTLSLMHSCGMYDFSGQFAFHVGLPAKSGVAGGILLVVPNVMGMMCWSPPLDKMGNSVKGIHFCHDLVSLCNFHNYDNLRHFAKKLDPRREGGDQRVKSVINLLFAAYTGDVSALRRFALSAMDMEQRDYDSRTALHVAAAEGHVEVVKFLLEACKVNPFPKDRWNNTPMDEALHFGHHDVFKILQEYQVQYTPQGDSDNGKENQTVHKNLDGLL

SEQ ID NO: 5447 - protein, 10 aa, Homo Sapiens
MEDEMPKTLY

SEQ ID NO: 5448 - protein, 1884 aa, Homo Sapiens
VAGCRRRGAGDPNMANLEESFPRGGTRKIHKPEKAFQQSVEQDNLFDISTEEGSTKRKKSQKGPAKTKKLKIEKRESSKSAREKFEILSVESLCEGMRILGCVKEVNELELVISLPNGLQGFVQVTEICDAYTKKLNEQVTQEQPLKDLLHLPELFSPGMLVRCVVSSLGITDRGKKSVKLSLNPKNVNRVLSAEALKPGMLLTGTVSSLEDHGYLVDIGVDGTRAFLPLLKAQEYIRQKNKGAKLKVGQYLNCIVEKVKGNGGVVSLSVGHSEVSTAIATEQQSWNLNNLLPGLVVKAQVQKVTPFGLTLNFLTFFTGVVDFMHLDPKKAGTYFSNQAVRACILCVHPRTRVVHLSLRPIFLQPGRPLTRLSCQNLGAVLDDVPVQGFFKKAGATFRLKDGVLAYARLSHLSDSKNVFNPEAFKPGNTHKCRIIDYSQMDELALLSLRTSIIEAQYLRYHDIEPGAVVKGTVLTIKSYGMLVKVGEQMRGLVPPMHLADILMKNPEKKYHIGDEVKCRVLLCDPEAKKLMMTLKKTLIESKLPVITCYADAKPGLQTHGFIIRVKDYGCIVKFYNNVQGLVPKHELSTEYIPDPERVFYTGQVVKVVVLNCEPSKERMLLSFKLSSDPEPKKEPAGHSQKKGKAINIGQLVDVKVLEKTKDGLEVAVLPHNIRAFLPTSHLSDHVANGPLLHHWLQAGDILHRVLCLSQSEGRVLLCRKPALVSTVEGGQDPKNFSEIHPGMLLIGFVKSIKDYGVFIQFPSGLSGLAPKAIMSDKFVTSTSDHFVEGQTVAAKVTNVDEEKQRMLLSLRLSDCGLGDLAITSLLLLNQCLEELQGVRSLMSNRDSVLIQTLAEMTPGMFLDLVVQEVLEDGSVVFSGGPVPDLVLKASRYHRAGQEVESGQKKKVVILNVDLLKLEVHVSLHQDLVNRKARKLRKGSEHQAIVQHLEKSFAIASLVETGHLAAFSLTSHLNDTFRFDSEKLQVGQGVSLTLKTTEPGVTGLLLAVEGPAAKRTMRPTQKDSETVDEDEEVDPALTVGTIKKHTLSIGDMVTGTVKSIKPTHVVVTLEDGIIGCIHASHILDDVPEGTSPTTKLKVGKTVTARVIGGRDMKTFKYLPISHPRFVRTIPELSVRPSELEDGHTALNTHSVSPMEKIKQYQAGQTVTCFLKKYNVVKKWLEVEIAPDIRGRIPLLLTSLSFKVLKHPDKKFRVGQALRATVVGPDSSKTFLCLSLTGPHKLEEGEVAMGRVVKVTPNEGLTVSFPFGKIGTVSIFHMSDSYSETPLEDFVPQKVVRCYILSTADNVLTLSLRSSRTNPETKSKVEDPEINSIQDIKEGQLLRGYVGSIQPHGVFFRLGPSVVGLARYSHVSQHSPSKKALYNKHLPEGKLLTARVLRLNHQKNLVELSFLPGDTGKPDVLSASLEGQLTKQEERKTEAEERDQKGEKKNQKRNEKKNQKGQEEVEMPSKEKQQPQKPQAQKRGGRECRESGSEQERVSKKPKKAGLSEEDDSLVDVYYREGKEEAEETNVLPKEKQTKPAEAPRLQLSSGFAWNVGLDSLTPALPPLAESSDSEEDEKPHQATIKKSKKERELEKQKAEKELSRIEEALMDPGRQPESADDFDRLVLSSPNSSILWLQYMAFHLQATEIEKARAVAERALKTISFREEQEKLNVWVALLNLENMYGSQESLTKVFERAVQYNEPLKVFLHLADIYAKSEKFQEAGELYNRMLKRFRQEKAVWIKYGAFLLRRSQAAASHRVLQRALECLPSKEHVDVIAKFAQLEFQLGDAERAKAIFENTLSTYPKRTDVWSVYIDMTIKHGSQKDVRDIFERVIHLSLAPKRMKFFFKRYLDYEKQHGTEKDVQAVKAKALEYVEAKSSVLED

SEQ ID NO: 5449 - protein, 1070 aa, Homo Sapiens
MCFSFIMPPAMADILDIWAVDSQIASDGSIPVDFLLPTGIYIQLEVPREATISYIKQMLWKQVHNYPMFNLLMDIDSYMFACVNQTAVYEELEDETRRLCDVRPFLPVLKLVTRSCDPGEKLDSKIGVLIGKGLHEFDSLKDPEVNEFRRKMRKFSEEKILSLVGLSWMDWLKQTYPPEHEPSIPENLEDKLYGGKLIVAVHFENCQDVFSFQVSPNMNPIKVNELAIQKRLTIHGKEDEVSPYDYVLQVSGRVEYVFGDHPLIQFQYIRNCVMNRALPHFILVECCKIKKMYEQEMIAIEAAINRNSSNLPLPLPPKKTRIISHVWENNNPFQIVLVKGNKLNTEETVKVHVRAGLFHGTELLCKTIVSSEVSGKNDHIWNEPLEFDINICDLPRMARLCFAVYAVLDKVKTKKSTKTINPSKYQTIRKAGKVHYPVAWVNTMVFDFKGQLRTGDIILHSWSSFPDELEEMLNPMGTVQTNPYTENATALHVKFPENKKQPYYYPPFDKIIEKAAEIASSDSANVSSRGGKKFLPVLKEILDRDPLSQLCENEMDLIWTLRQDCREIFPQSLPKLLLSIKWNKLEDVAQLQALLQIWPKLPPREALELLDFNYPDQYVREYAVGCLRQMSDEELSQYLLQLVQVLKYEPFLDCALSRFLLERALGNRRIGQFLFWHLRSEVHIPAVSVQFGVILEAYCRGSVGHMKVLSKQVEALNKLKTLNSLIKLNAVKLNRAKGKEAMHTCLKQSAYREALSDLQSPLNPCVILSELYVEKCKYMDSKMKPLWLVYNNKVFGEDSVGVIFKNGDDLRQDMLTLQMLRLMDLLWKEAGLDLRMLPYGCLATGDRSGLIEVVSTSETIADIQLNSSNVAAAAAFNKDALLNWLKEYNSGDDLDRAIEEFTLSCAGYCVASYVLGIGDRHSDNIMVKKTGQLFHIDFGHILGNFKSKFGIKRERVPFILTYDFIHVIQQGKTGNTEKFGRFRQCCEDAYLILRRHGNLFITLFALMLTAGLPELTSVKDIQYLKDSLALGKSEEEALKQFKQKFDEALRESWTTKVNWMAHTVRKDYRS

SEQ ID NO: 5450 - protein, 560 aa, Homo Sapiens
MFARMSDLHVLLLMALVGKTACGFSLMSLLESLDPDWTPDQYDYSYEDYNQEENTSSTLTHAENPDWYYTEDQADPCQPNPCEHGGDCLVHGSTFTCSCLAPFSGNKCQKVQNTCKDNPCGRGQCLITQSPPYYRCVCKHPYTGPSCSQVVPVCRPNPCQNGATCSRHKRRSKFTCACPDQFKGKFCEIGSDDCYVGDGYSYRGKMNRTVNQHACLYWNSHLLLQENYNMFMEDAETHGIGEHNFCRNPDADEKPWCFIKVTNDKVKWEYCDVSACSAQDVAYPEESPTEPSTKLPGFDSCGKTEIAERKIKRIYGGFKSTAGKHPWQASLQSSLPLTISMPQGHFCGGALIHPCWVLTAAHCTDIKTRHLKVVLGDQDLKKEEFHEQSFRVEKIFKYSHYNERDEIPHNDIALLKLKPVDGHCALESKYVKTVCLPDGSFPSGSECHISGWGVTETGKGSRQLLDAKVKLIANTLCNSRQLYDHMIDDSMICAGNLQKPGQDTCQGDSGGPLTCEKDGTYYVYGIVSWGLECGKRPGVYTQVTKFLNWIKATIKSESGF

SEQ ID NO: 5451 - protein, 275 aa, Homo Sapiens
MLNLLLLALPVLASRAYAAPAPGQALQRVGIVGGQEAPRSKWPWQVSLRVHGPYWMHFCGGSLIHPQWVLTAAHCVGPDVKDLAALRVQLREQHLYYQDQLLPVSRIIVHPQFYTAQIGADIALLELEEPVNVSSHVHTVTLPPASETFPPGMPCWVTGWGDVDNDERLPPPFPLKQVKVPIMENHICDAKYHLGAYTGDDVRIVRDDMLCAGNTRRDSCQGDSGGPLVCKVNGTWLQAGVVSWGEGCAQPNRPGIYTRVTYYLDWIHHYVPKKP

SEQ ID NO: 5452 - protein, 491 aa, Homo Sapiens
MKTFTWTLGVLFFLLVDTGHCRGGQFKIKKINQRRYPRATDGKEEAKKCAYTFLVPEQRITGPICVNTKGQDASTIKDMITRMDLENLKDVLSRQKREIDVLQLVVDVDGNIVNEVKLLRKESRNMNSRVTQLYMQLLHEIIRKRDNSLELSQLENKILNVTTEMLKMATRYRELEVKYASLTDLVNNQSVMITLLEEQCLRIFSRQDTHVSPPLVQVVPQHIPNSQQYTPGLLGGNEIQRDPGYPRDLMPPPDLATSPTKSPFKIPPVTFINEGPFKDCQQAKEAGHSVSGIYMIKPENSNGPMQLWCENSLDPGGWTVIQKRTDGSVNFFRNWENYKKGFGNIDGEYWLGLENIYMLSNQDNYKLLIELEDWSDKKVYAEYSSFRLEPESEFYRLRLGTYQGNAGDSMMWHNGKQFTTLDRDKDMYAGNCAHFHKGGWWYNACAHSNLNGVWYRGGHYRSKHQDGIFWAEYRGGSYSLRAVQMMIKPID

SEQ ID NO: 5453 - protein, 96 aa, Homo Sapiens
MTSALENYINRTVAVITSDGRMIVGTLKGFDQTINLILDESHERVFSSSQGVEQVVLGLYIVRGDNVAVIGEIDEETDSALDLGNIRAEPLNSVAH

SEQ ID NO: 5454 - protein, 495 aa, Homo Sapiens
MPQLLQNINGIIEAFRRYARTEGNCTALTRGELKRLLEQEFADVIVKPHDPATVDEVLRLLDEDHTGTVEFKEFLVLVFKVAQACFKTLSESAEGACGSQESGSLHSGASQELGEGQRSGTEVGRAGKGQHYEGSSHRQSQQGSRGQNRPGVQTQGQATGSAWVSSYDRQAESQSQERISPQIQLSGQTEQTQKAGEGKRNQTTEMRPERQPQTREQDRAHQTGETVTGSGTQTQAGATQTVEQDSSHQTGRTSKQTQEATNDQNRGTETHGQGRSQTSQAVTGGHAQIQAGTHTQTPTQTVEQDSSHQTGSTSTQTQESTNGQNRGTEIHGQGRSQTSQAVTGGHTQIQAGSHTETVEQDRSQTVSHGGAREQGQTQTQPGSGQRWMQVSNPEAGETVPGGQAQTGASTESGRQEWSSTHPRRCVTEGQGDRQPTVVGEEWVDDHSRETVILRLDQGNLHTSVSSAQGQDAAQSEEKRGITARELYSYLRSTKP

SEQ ID NO: 5455 - protein, 403 aa, Homo Sapiens
MFVASERKMRAHQVLTFLLLFVITSVASENASTSRGCGLDLLPQYVSLCDLDAIWGIVVEAVAGAGALITLLLMLILLVRLPFIKEKEKKSPVGLHFLFLLGTLGLFGLTFAFIIQEDETICSVRRFLWGVLFALCFSCLLSQAWRVRRLVRHGTGPAGWQLVGLALCLMLVQVIIAVEWLVLTVLRDTRPACAYEPMDFVMALIYDMVLLVVTLGLALFTLCGKFKRWKLNGAFLLITAFLSVLIWVAWMTMYLFGNVKLQQGDAWNDPTLAITLAASGWVFVIFHAIPEIHCTLLPALQENTPNYFDTSQPRMRETAFEEDVQLPRAYMENKAFSMDEHNAALRTAGFPNGSLGKRPSGSLGKRPSAPFRSNVYQPTEMAVVLNGGTIPTAPPSHTGRHLW

SEQ ID NO: 5456 - protein, 805 aa, Homo Sapiens [sequence omitted]

SEQ ID NO: 5457 - protein, 657 aa, Homo Sapiens
MRLKIGFILRSLLVVGSFLGLVVLWSSLTPRPDDPSPLSRMREDRDVNDPMPNRGGNGLAPGEDRFKPVVPWPHVEGVEVDLESIRRINKAKNEQEHHAGGDSQKDIMQRQYLTFKPQTFTYHDPVLRPGILGNFEPKEPEPPGVVGGPGEKAKPLVLGPEFKQAIQASIKEFGFNMVASDMISLDRNVNDLRQEECKYWHYDENLLTSSVVIVFHNEGWSTLMRTVHSVIKRTPRKYLAEIVLIDDFSNKEHLKEKLDEYIKLWNGLVKVFRNERREGLIQARSIGAQKAKLGQVLIYLDAHCEVAVNWYAPLVAPISKDRTICTVPLIDVINGNTYEIIPQGGGDEDGYARGAWDWSMLWKRVPLTPQEKRLRKTKTEPYRSPAMAGGLCAIEREFFFELGLYDPSLQIWGGENFEISYKIWQCGGKLLFVPCSRVGHIYRLEGWQGNPPPIYVGSSPTLKNYVRVVEVWWDEYKDYFYASRPESQALPYGDISELKKFREDHNCQSFKWFMEEIAYDITSHYPLPPKNVDWGEIRGFETAYCIDSMGKTNGGFVELGPCHRMGGNQLFRINEANQLMQYDQCLTKGADGSKVMITHCNLNEFKEWQYFKNLHRFTHIPSGKCLDRSEVLHQVFISNCDSSKTTQKWEMNNIHSV

SEQ ID NO: 5458 - protein, 221 aa, Homo Sapiens
MAFVKSGWLLRQSTILKRWKKNWFDLWSDGHLIYYDDQTRQNIEDKVHMPMDCINIRTGQECRDTQPPDGKSKDCMLQIVCRDGKTISLCAESTDDCLAWKFTLQDSRTNTAYVGSAVMTDETSVVSSPPPYTAYAAPAPEAYGYGPYGGAYPPGTQVVYAANGQAYAVPHQYPYAGLYGQQPANQVIIRERYRDNDSDLALGMLAGAATGMALGSLFWVF

SEQ ID NO: 5459 - protein, 488 aa, Homo Sapiens
MPGGRRGPSRQQLSRSALPSLQTLVGGGCGNGTGLRNRNGSAIGLPVPPITALITPGPVRHCQIPDLPVDGSLLFEFLFFIYLLVALFIQYINIYKTVWWYPYNHPASCTSLNFHLIDYHLAAFITVMLARRLVWALISEATKAGAASMIHYMVLISARLVLLTLCGWVLCWTLVNLFRSHSVLNLLFLGYPFGVYVPLCCFHQDSRAHLLLTDYNYVVQHEAVEESASTVGGLAKSKDFLSLLLESLKEQFNNATPIPTHSCPLSPDLIRNEVECLKADFNHRIKEVLFNSLFSAYYVAFLPLCFVKSTQYYDMRWSCEHLIMVWINAFVMLTTQLLPSKYCDLLHKSAAHLGKWQKLEHGSYSNAPQHIWSENTIWPQGVLVRHSRCLYRAMGPYNVAVPSDVSHARFYFLFHRPLRLLNLLILIEGSVVFYQLYSLLRSEKWNHTLSMALILFCNYYVLFKLLRDRIVLGRAYSYPLNSYELKAN

SEQ ID NO: 5460 - protein, 136 aa, Homo Sapiens
MARTKQTARKSTGGKAPRKQLATKAARKSAPATGGVKKPHRYRPGTVALREIRRYQKSTELLIRKLPFQRLVREIAQDFKTDLRFQSSAVMALQEACEAYLVGLFEDTNLCAIHAKRVTIMPKDIQLARRIRGERA

SEQ ID NO: 5461 - protein, 1117 aa, Homo Sapiens
MARTRDRVRLLLLLICFNVGSGLHLQVLSTRNENKLLPKHPHLVRQKRAWITAPVALREGEDLSKKNPIAKIHSDLAEERGLKITYKYTGKGITEPPFGIFVFNKDTGELNVTSILDREETPFFLLTGYALDARGNNVEKPLELRIKVLDINDNEPVFTQDVFVGSVEELSAAHTLVMKINATDADEPNTLNSKISYRIVSLEPAYPPVFYLNKDTGEIYTTSVTLDREEHSSYTLTVEARDGNGEVTDKPVKQAQVQIRILDVNDNIPVVENKVLEGMVEENQVNVEVTRIKVFDADEIGSDNWLANFTFASGNEGGYFHIETDAQTNEGIVTLIKEVDYEEMKNLDFSVIVANKAAFHKSIRSKYKPTPIPIKVKVKNVKEGIHFKSSVISIYVSESMDRSSKGQIIGNFQAFDEDTGLPAHARYVKLEDRDNWISVDSVTSEIKLAKLPDFESRYVQNGTYTVKIVAISEDYPRKTITGTVLINVEDINDNCPTLIEPVQTICHDAEYVNVTAEDLDGHPNSGPFSFSVIDKPPGMAEKWKIARQESTSVLLQQSEKKLGRSEIQFLISDNQGFSCPEKQVLTLTVCEVLHGSGCREAQHDSYVGLGPAAIALMILAFLLLLLVPLLLLMCHCGKGAKAFTPIPGTIEMLHPWNNEGAPPEDKVVPSFLPVDQGGSLVGRNGVGGMAKEATMKGSSSASIVKGQHEMSEMDGRWEEHRSLLSGRATQFTGATGAIMTTETTKTARATGASRDMAGAQAAAVALNEEFLRNYFTDKAASYTEEDENHTAKDCLLVYSQEETESLNASIGCCSFIEGELDDRFLDDLGLKFKTLAEVCLGQKIDINKEIEQRQKPATETSMNTASHSLCEQTMVNSENTYSSGSSFPVPKSLQEANAEKVTQEIVTERSVSSRQAQKVATPLPDPMASRNVIATETSYVTGSTMPPTTVILGPSQPQSLIVTERVYAPASTLVDQPYANEGTVVVTERVIQPHGGGSNPLEGTQHLQDVPYVMVRERESFLAPSSGVQPTLAMPNIAVGQNVTVTERVLAPASTLQSSYQIPTENSMTARNTTVSGAGVPGPLPDFGLEESGHSNSTITTSSTRVTKHSTVQHSYS

SEQ ID NO: 5462 - protein, 392 aa, Homo Sapiens
MVLLSILRILFLCELVLFMEHRAQMAEGGQSSIALLAEAPTLPLIEELLEESPGEQPRKPRLLGHSLRYMLELYRRSADSHGHPRENRTIGATMVRLVKPLTSVARPHRGTWHIQILGFPLRPNRGLYQLVRATVVYRHHLQLTRFNLSCHVEPWVQKNPTNHFPSSEGDSSKPSLMSNAWKEMDITQLVQQRFWNNKGHRILRLRFMCQQQKDSGGLELWHGTSSLDIAFLLLYFNDTHKSIRKAKFLPRGMEEFMERESLLRRTRQADGISAEVTASSSKHSGPENNQCSLHPFQISFRQLGWDHWIIAPPFYTPNYCKGTCLRVLRDGLNSPNHAIIQNLINQLVDQSVPRPSCVPYKYVPISVLMIEANGSILYKEYEGMIAESCTCR

SEQ ID NO: 5463 - protein, 115 aa, Homo Sapiens
LPVLTQPPSASALLGASIKLTCTLSSEHSTYTIEWYQQRPGRSPQYIMKVKSDGSHSKGDGIPDRFMGSSSGADRYLTFSNLQSDDEAGYHCGESHTIDGQVGWVFGGGTKLTVL

SEQ ID NO: 5464 - protein, 208 aa, Homo Sapiens
MWKWILTHCASAFPHLPGCCCCCFLLLFLVSSVPVTCQALGQDMVSPEATNSSSSSFSSPSSAGRHVRSYNHLQGDVRWRKLFSFTKYFLKIEKNGKVSGTKKENCPYSILEITSVEIGVVAVKAINSNYYLAMNKKGKLYGSKEFNNDCKLKERIEENGYNTYASFNWQHNGRQMYVALNGKGAPRRGQKTRRKNTSAHFLPMVVHS

SEQ ID NO: 5465 - protein, 554 aa, Homo Sapiens [sequence omitted]

SEQ ID NO: 5466 - protein, 190 aa, Homo Sapiens
  misc_feature (40)..(40): Xaa can be any naturally occurring amino acid
MAFIAKSFYDLSAISLDGEKVDFNTFRGRAVLIENVRSLXGTTTRDFTQLNELQCRFPRRLVVLGFPCNQFGHQENSQNEEILNSLKYVRPGGGYQPTFTLVQKCEVNGQNEHPVFAYLKDKLPYPYDDPFSLMTDPKLIIWSPVRRSDVAWNFEKFLIGPEGEPFRRYSRTFPTINIEPDIKRLLKVAI

SEQ ID NO: 5467 - protein, 263 aa, Homo Sapiens
MKGGFTGGDEYQKHFLPRDYLATYYSFDGSPSPEAEMLKFNLECLHKTFGPGGLQGDTLIDIGSGPTIYQVLAACDSFQDITLSDFTDRNREELEKWLKKEPGAYDWTPAVKFACELEGNSGRWEEKEEKLRAAVKRVLKCDVHLGNPLAPAVLPLADCVLTLLAMECACCSLDAYRAALCNLASLLKPGGHLVTTVTLRLPSYMVGKREFSCVALEKGEVEQAVLDAGFDIEQLLHSPQSYSVTNAANNGVCCIVARKKPGP

SEQ ID NO: 5468 - protein, 725 aa, Homo Sapiens
MADEDLIFRLEGVDGGQSPRAGHDGDSDGDSDDEEGYFICPITDDPSSNQNVNSKVNKYYSNLTKSERYSSSGSPANSFHFKEAWKHAIQKAKHMPDPWAEFHLEDIATERATRHRYNAVTGEWLDDEVLIKMASQPFGRGAMRECFRTKKLSNFLHAQQWKGASNYVAKRYIEPVDRDVYFEDVRLQMEAKLWGEEYNRHKPPKQVDIMQMCIIELKDRPGKPLFHLEHYIEGKYIKYNSNSGFVRDDNIRLTPQAFSHFTFERSGHQLIVVDIQGVGDLYTDPQIHTETGTDFGDGNLGVRGMALFFYSHACNRICESMGLAPFDLSPRERDAVNQNTKLLQSAKTILRGTEEKCGSPRVRTLSGSRPPLLRPLSENSGDENMSDVTFDSLPSSPSSATPHSQKLDHLHWPVFSDLDNMASRDHDHLDNHRESENSGDSGYPSEKRGELDDPEPREHGHSYSNRKYESDEDSLGSSGRVCVEKWNLLNSSRLHLPRASAVALEVQRLNALDLEKKIGKSILGKVHLAMVRYHEGGRFCEKGEEWDQESAVFHLEHAANLGELEAIVGLGLMYSQLPHHILADVSLKETEENKTKGFDYLLKAAEAGDRQSMILVARAFDSGQNLSPDRCQDWLEALHWYNTALEMTDCDEGGEYDGMQDEPRYMMLAREAEMLFTGGYGLEKDPQRSGDLYTQAAEAAMEAMKGRLANQYYQKAEEAWAQMEE

SEQ ID NO: 5469 - protein, 216 aa, Homo Sapiens
MRSGCVVVHVWILAGLWLAVAGRPLAFSDAGPHVHYGWGDPIRLRHLYTSGPHGLSSCFLRIRADGVVDCARGQSAHSLLEIKAVALRTVAIKGVHSVRYLCMGADGKMQGLLQYSEEDCAFEEEIRPDGYNVYRSEKHRLPVSLSSAKQRQLYKNRGFLPLSHFLPMLPMVPEEPEDLRGHLESDMFSSPLETDSMDPFGLVTGLEAVRSPSFEK

SEQ ID NO: 5470 - protein, 125 aa, Homo Sapiens
MPACRLGPLAAALLLSLLLFGFTLVSGTGAEKTGVCPELQADQNCTQECVSDSECADNLKCCSAGCATFCLLCPNDKEGSCPQVNINFPQLGLCRDQCQVDSQCPGQMKCCRNGCGKVSCVTPNF

SEQ ID NO: 5471 - protein, 759 aa, Homo Sapiens
MMAALYPSTDLSGASSSSLPSSPSSSSPNEVMALKDVREVKEENTLNEKLFLLACDKGDYYMVKKILEENSSGDLNINCVDVLGRNAVTITIENENLDILQLLLDYGCQKLMERIQNPEYSTTMDVAPVILAAHRNNYEILTMLLKQDVSLPKPHAVGCECTLCSAKNKKDSLRHSRFRLDIYRCLASPALIMLTEEDPILRAFELSADLKELSLVEVEFRNDYEELARQCKMFAKDLLAQARNSRELEVILNHTSSDEPLDKRGLLEERMNLSRLKLAIKYNQKEFVSQSNCQQFLNTVWFGQMSGYRRKPTCKKIMTVLTVGIFWPVLSLCYLIAPKSQFGRIIHTPFMKFIIHGASYFTFLLLLNLYSLVYNEDKKNTMGPALERIDYLLILWIIGMIWSDIKRLWYEGLEDFLEESRNQLSFVMNSLYLATFALKVVAHNKFHDFADRKDWDAFHPTLVAEGLFAFANVLSYLRLFFMYTTSSILGPLQISMGQMLQDFGKFLGMFLLVLFSFTIGLTQLYDKGYTSKEQKDCVGIFCEQQSNDTFHSFIGTCFALFWYIFSLAHVAIFVTRFSYGEELQSFVGAVIVGTYNVVVVIVLTKLLVAMLHKSFQLIANHEDKEWKFARAKLWLSYFDDKCTLPPPFNIIPSPKTICYMISSLSKWICSHTSKGKVKRQNSLKEWRNLKQKRDENYQKVMCCLVHRYLTSMRQKMQSTDQATVENLNELRQDLSKFRNEIRDLLGFRTSKYAMFYPRN

SEQ ID NO: 5472 - protein, 214 aa, Homo Sapiens
MNVFRILGDLSHLLAMILLLGKIWRSKCCKGISGKSQILFALVFTTRYLDLFTNFISIYNTVMKVVFLLCAYVTVYMIYGKFRKTFDSENDTFRLEFLLVPVIGLSFLENYSFTLLEILWTFSIYLESVAILPQLFMISKTGEAETITTHYLFFLGLYRALYLANWIRRYQTENFYDQIAVVSGVVQTIFYCDFFYLYVTKVLKGKKLSLPMPI

SEQ ID NO: 5473 - protein, 226 aa, Homo Sapiens
MDWGTLQTILGGVNKHSTSIGKIWLTVLFIFRIMILVVAAKEVWGDEQADFVCNTLQPGCKNVCYDHYFPISHIRLWALQLIFVSSPALLVAMHVAYRRHEKKRKFIKGEIKSEFKDIEEIKTQKVRIEGSLWWTYTSSIFFRVIFEAAFMYVFYVMYDGFSMQRLVKCNAWPCPNTVDCFVSRPTEKTVFTVFMIAVSGICILLNVTELCYLLIRYCSGKSKKPV

SEQ ID NO: 5474 - protein, 375 aa, Homo Sapiens
MLLFLLSALVLLTQPLGYLEAEMKTYSHRTTPSACTLVMCSSVESGLPGRDGRDGREGPRGEKGDPGLPGAAGQAGMPGQAGPVGPKGDNGSVGEPGPKGDTGPSGPPGPPGVPGPAGREGPLGKQGNIGPQGKPGPKGEAGPKGEVGAPGMQGSAGARGLAGPKGERGVPGERGVPGNAGAAGSAGAMGPQGSPGARGPPGLKGDKGIPGDKGAKGESGLPDVASLRQQVEALQGQVQHLQAAFSQYKKVELFPNGQSVGEKIFKTAGFVKPFTEAQLLCTQAGGQLASPRSAAENAALQQLVVAKNEAAFLSMTDSKTEGKFTYPTGESLVYSNWAPGEPNDDGGSEDCVEIFTNGKWNDRACGEKRLVVCEF

SEQ ID NO: 5475 - protein, 109 aa, Homo Sapiens
MGMARGSLTRVPGVMGEGTQGPELSLDPDPCSPQSTPGLMKGNKLEEQDPRPLQPIPGLMEGNKLEEQDSSPPQSTPGLMKGNKREEQGLGPEPAAPQQPTAEEEALIE

SEQ ID NO: 5476 - protein, 314 aa, Homo Sapiens
LQQWIQKLSKNTVTDDILCTSPGHLDKKELKALNSEILCPGLVNNPSMPTQTSYLMVTTPATTTNTADTILRSLTDAVPLSVLILGLLIMFITIVFCAAGIVVLVLHRRRRYKKKQVDEQMRDNSPVHLQYSMYGHKTTHHTTERPSASLYEQHMVSPMVHVYRSPSFGPKHLEEEEERNEKEGSDAKHLQRSLLEQENHSPLTGSNMKYKTTNQSTEFLSFQDASSLYRNILEKERELQQLGITEYLRKNIAQLQPDMEAHYPGAHEELKLMETLMYSRPRKVLVEQTKNEYFELKANLHAEPDYLEVLEQQT

SEQ ID NO: 5477 - protein, 475 aa, Homo Sapiens
MAELQMLLEEEIPGGRRALFDRYTNLERVADYCENNYIQSADKQRALEETKAYTTQSLASVAYLINTLDNNVLQMLDIQASQLRRMESSINHISQTVDIHKEKVARREIGILTTNKNTSRTHKIIAPANLERPVRYIRKPIDYTILDDIGHGVKVSTQNMKMGGLPRTTPPTQKPPSPPMSGKGTLGRHSPYRTLEPVRPPVVPNDYVPSPTRNMAPSQQSPVRTASVNQRNRTYSSSGSSGGSHPSSRSSSRENSGSGSVGVPIAVPTPSPPSVFPGHPVQFYSMNRPASRHTPPTIGGSLPYRRPPSITSQTSLQNQMNGGPFYSQNPVSLAPPPPSILQVTPTLPLMGFVARVQENISDTPPPPPPVEEPVFDESPPPPPPPEDYEEEEAAVVEYSDPYAEEDPPWAPRSYLEKVVAIYDYTKDKEDELSFQEGAIIYVIKKNDDGWYEGVMNGVTGLFPGNYVESIMHYSE

SEQ ID NO: 5478 - protein, 773 aa, Homo Sapiens
MAEAHQAVAFQFTVTPDGIDLRLSHEALRQIYLSGLHSWKKKFIRFKNGIITGVYPASPSSWLIVVVGVMTTMYAKIDPSLGIIAKINRTLETANCMSSQTKNVVSGVLFGTGLWVALIVTMRYSLKVLLSYHGWMFTEHGKMSRATKIWMGMVKIFSGRKPMLYSFQTSLPRLPVPAVKDTVNRYLQSVRPLMKEEDFKRMTALAQDFAVGLGPRLQWYLKLKSWWATNYVSDWWEEYIYLRGRGPLMVNSNYYAMDLLYILPTHIQAARAGNAIHAILLYRRKLDREEIKPIRLLGSTIPLCSAQWERMFNTSRIPGEETDTIQHMRDSKHIVVYHRGRYFKVWLYHDGRLLKPREMEQQMQRILDNTSEPQPGEARLAALTAGDRVPWARCRQAYFGRGKNKQSLDAVEKAAFFVTLDETEEGYRSEDPDTSMDSYAKSLLHGRCYDRWFDKSFTFVVFKNGKMGLNAEHSWADAQIVAHLWEYVMSIDSLQLGYAEDGHCKGDINPNIPYPTRLQWDIPGECQEVIETSLNTANLLANDVDFHSFPFVAFGKGIIKKCRTSPDTFVQLALQLAHYKDMGKFCLTYEASMTRLFREGRTETVRSCTTESCDFVRAMVDPAQTVEQRLKLFKLASEKHQHMYRLAMTGSGIDRHLFCLYVVSKYLAVESPFLKEVLSEPWRLSTSQTPQQQVELFDLENNPEYVSSGGGFGPVADDGYGVSYILVGENLINFHISSKFSCPETDSHRFGRHLKEAMTDIITLFGLSSNSKK

SEQ ID NO: 5479 - protein, 198 aa, Homo Sapiens
MDAILNYRSEDTEDYYTLLGCDELSSVEQILAEFKVRALECHPDKHPENPKAVETFQKLQKAKEILTNEESRARYDHWRRSQMSMPFQQWEALNDSVKTSMHWVVRGKKDLMLEESDKTHTTKMENEECNEQRERKKEELASTAEKTEQKEPKPLEKSVSPQNSDSSGFADVNGWHLRFRWSKDAPSELLRKFRNYEI

SEQ ID NO: 5480 - protein, 1495 aa, Homo Sapiens
LLLFFPLGLQQPLLLLLSPPFQHEIQRRKEEIKEEKKRKEMAKQERLEIASLSNQDHTSKKDPGGHRTAAILHGGSPDFVGNGKHRANSSGRSRRERQYSVCNSEDSPGSCEILYFNMGSPDQLMVHKGKCIGSDEQLGKLVYNALETATGGFVLLYEWVLQWQKKMGPFLTSQEKEKIDKCKKQIQGTETEFNSLVKLSHPNVVRYLAMNLKEQDDSIVVDILVEHISGVSLAAHLSHSGPIPVHQLRRYTAQLLSGLDYLHSNSVVHKVLSASNVLVDAEGTVKITDYSISKRLADICKEDVFEQTRVRFSDNALPYKTGKKGDVWRLGLLLLSLSQGQECGEYPVTIPSDLPADFQDFLKKCVCLDDKERWSPQQLLKHSFINPQPKMPLVEQSPEDSGGQDYVETVIPSNRLPSAAFFSETQRQFSRYFIEFEELQLLGKGAFGAVIKVQNKLDGCCYAVKRIPINPASRQFRRIKGEVTLLSRLHHENIVRYYNAWIERHERPAGPGTPPPDSGPLAKDDRAARGQPASDTDGLDSVEAAAPPPILSSSVEWSTSGERSASARFPATGPGSSDDEDDDEDEHGGVFSQSFLPASDSESDIIFDNEDENSKSQNQDEDCNEKNGCHESEPSVTTEAVHYLYIQMEYCEKSTLRDTIDQGLYRDTVRLWRLFREILDGLAYIHEKGMIHRDLKPVNIFLDSDDHVKIGDFGLATDHLAFSADSKQDDQTGDLIKSDPSGHLTGMVGTALYVSPEVQGSTKSAYNQKVDLFSLGIIFFEMSYHPMVTASERIFVLNQLRDPTSPKFPEDFDDGEHAKQKSVISWLLNHDPAKRPTATELLKSELLPPPQMEESELHEVLHHTLTNVDGKAYRTMMAQIFSQRISPAIDYTYDSDILKGNFSIRTAKMQQHVCETIIRIFKRHGAVQLCTPLLLPRNRQIYEHNEAALFMDHSGMLVMLPFDLRIPFARYVARNNILNLKRYCIERVFRPRKLDRFHPKELLECAFDIVTSTTNSFLPTAEIIYTIYEIIQEFPALQERNYSIYLNHTMLLKAILLHCGIPEDKLSQVYIILYDAVTEKLTRREVEAKFCNLSLSSNSLCRLYKFIEQKGDLQDLMPTINSLIKQKTGIAQLVKYGLKDLEEVVGLLKKLGIKLQVLINLGLVYKVQQHNGIIFQFVAFIKRRQRAVPEILAAGGRYDLLIPQFRGPQALGPVPTAIGVSIAIDKISAAVLNMEESVTISSCDLLVVSVGQMSMSRAINLTQKLWTAGITAEIMYDWSQSQEELQEYCRHHEITYVALVSDKEGSHVKVKSFEKERQTEKRVLETELVDHVLQKLRTKVTDERNGREASDNLAVQNLKGSFSNASGLFEIHGATVVPIVSVLAPEKLSASTRRRYETQVQTRLQTSLANLHQKSSEIEILAVDLPKETILQFLSLEWDADEQAFNTTVKQLLSRLPKQRYLKLVCDEIYNIKVEKKVSVLFLYSYRDDYYRILF

SEQ ID NO: 5481 - protein, 796 aa, Homo Sapiens [sequence omitted]

SEQ ID NO: 5482 - protein, 321 aa, Homo Sapiens
MGEPQGSMRILVTGGSGLVGKAIQKVVADGAGLPGEDWVFVSSKDADLTDTAQTRALFEKVQPTHVIHLAAMVGGLFRNIKYNLDFWRKNVHMNDNVLHSAFEVGARKVVSCLSTCIFPDKTTYPIDETMIHNGPPHNSNFGYSYAKRMIDVQNRAYFQQYGCTFTAVIPTNVFGPHDNFNIEDGHVLPGLIHKVHLAKSSGSALTVWGTGNPRRQFIYSLDLAQLFIWVLREYNEVEPIILSVGEEDEVSIKEAAEAVVEAMDFHGEVTFDTTKSDGQFKKTASNSKLRTYLPDFRFTPFKQAVKETCAWFTDNYEQARK

SEQ ID NO: 5483 - protein, 1051 aa, Homo Sapiens
MGPGPSRAPRAPRLMLCALALMVAAGGCVVSAFNLDTRFLVVKEAGNPGSLFGYSVALHRQTERQQRYLLLAGAPRELAVPDGYTNRTGAVYLCPLTAHKDDCERMNITVKNDPGHHIIEDMWLGVTVASQGPAGRVLVCAHRYTQVLWSGSEDQRRMVGKCYVRGNDLELDSSDDWQTYHNEMCNSNTDYLETGMCQLGTSGGFTQNTVYFGAPGAYNWKGNSYMIQRKEWDLSEYSYKDPEDQGNLYIGYTMQVGSFILHPKNITIVTGAPRHRHMGAVFLLSQEAGGDLRRRQVLEGSQVGAYFGSAIALADLNNDGWQDLLVGAPYYFERKEEVGGAIYVFMNQAGTSFPAHPSLLLHGPSGSAFGLSVASIGDINQDGFQDIAVGAPFEGLGKVYIYHSSSKGLLRQPQQVIHGEKLGLPGLATFGYSLSGQMDVDENFYPDLLVGSLSDHIVLLRARPVINIVHKTLVPRPAVLDPALCTATSCVQVELCFAYNQSAGNPNYRRNITLAYTLEADRDRRPPRLRFAGSESAVFHGFFSMPEMRCQKLELLLMDNLRDKLRPIIISMNYSLPLRMPDRPRLGLRSLDAYPILNQAQALENHTEVQFQKECGPDNKCESNLQMRAAFVSEQQQKLSRLQYSRDVRKLLLSINVTNTRTSERSGEDAHEALLTLVVPPALLLSSVRPPGACQANETIFCELGNPFKRNQRMELLIAFEVIGVTLHTRDLQVQLQLSTSSHQDNLWPMILTLLVDYTLQTSLSMVNHRLQSFFGGTVMGESGMKTVEDVGSPLKYEFQVGPMGEGLVGLGTLVLGLEWPYEVSNGKWLLYPTEITVHGNGSWPCRPPGDLINPLNLTLSDPGDRPSSPQRRRRQLDPGGGQGPPPVTLAAAKKAKSETVLTCATGRAHCVWLECPIPDAPVVTNVTVKARVWNSTFIEDYRDFDRVRVNGWATLFLRTSIPTINMENKTTWFSVDIDSELVEELPAEIELWLVLVAVGAGLLLLGLIILLLWKCGFFKRARTRALYEAKRQKAEMKSQPSETERLTDDY

SEQ ID NO: 5484 - protein, 389 aa, Homo Sapiens
MEGALAANWSAEAANASAAPPGAEGNRTAGPPRRNEALARVEVAVLCLILLLALSGNACVLLALRTTRQKHSRLFFFMKHLSIADLVVAVFQVLPQLLWDITFRFYGPDLLCRLVKYLQVVGMFASTYLLLLMSLDRCLAICQPLRSLRRRTDRLAVLATWLGCLVASAPQVHIFSLREVADGVFDCWAVFIQPWGPKAYITWITLAVYIVPVIVLAACYGLISFKIWQNLRLKTAAAAAAEAPEGAAAGDGGRVALARVSSVKLISKAKIRTVKMTFIIVLAFIVCWTPFFFVQMWSVWDANAPKEASAFIIVMLLASLNSCCNPWIYMLFTGHLFHELVQRFLCCSASYLKGRRLGETSASKKSNSSSFVLSHRSSSQRSCSQPSTA

SEQ ID NO: 5485 - protein, 239 aa, Homo Sapiens
MPTATGLTLLTSASSAISDPGGEVSAPWGGLRTWTQPLRCWERLLPPPGDPRTVAENTQQDECGLPGSCPARPLSRKPECGREGILPCCSSSAWPEGSFRPFQMNLFSFLSFFFLFFFFLRWSLTLSPRLECSSAISAHCNLRLPGSSNSPALASQVAGITGICHHARQIFVFLVETGFCHVGQAGLELLISGDSPASAFQSAGIIGVSHRARPGSVFLARSEESLYLRPGQQSQEVKV

SEQ ID NO: 5486 - protein, 518 aa, Homo Sapiens
MESPEEPGASMDENYFVNYTFKDRSHSGRVAQGIMKLCLEEELFADVTISVEGREFQLHRLVLSAQSCFFRSMFTSNLKEAHNRVIVLQDVSESVFQLLVDYIYHGTVKLRAEELQEIYEVSDMYQLTSLFEECSRFLARTVQVGNCLQVMWLADRHSDPELYTAAKHCAKTHLAQLQNTEEFLHLPHRLLTDIISDGVPCSQNPTEAIEAWINFNKEEREAFAESLRTSLKEIGENVHIYLIGKESSRTHSLAVSLHCAEDDSISVSGQNSLCHQITAACKHGGDLYVVGGSIPRRMWKCNNATVDWEWCAPLPRDRLQHTLVSVPGKDAIYSLGGKTLQDTLSNAVIYYRVGDNVWTETTQLEVAVSGAAGANLNGIIYLLGGEENDLDFFTKPSRLIQCFDTETDKCHVKPYVLPFAGRMHAAVHKDLVFIVAEGDSLVCYNPLLDSFTRLCLPEAWSSAPSLWKIASCNGSIYVFRDRYKKGDANTYKLDPATSAITVTRGIKVLLTNLQFVLA

SEQ ID NO: 5487 - protein, 604 aa, Homo Sapiens
MGAALGTGTRLAPWPGRACGALPRWTPTAPAQGCHSKPGPARPVPLKKRGYDVTRNPHLNKGMAFTLEERLQLGIHGLIPPCFLSQDVQLLRIMRYYERQQSDLDKYIILMTLQDRNEKLFYRVLTSDVEKFMPIVYTPTVGLACQHYGLTFRRPRGLFITIHDKGHLATMLNSWPEDNIKAVVVTDGERILGLGDLGCYGMGIPVGKLALYTACGGVNPQQCLPVLLDVGTNNEELLRDPLYIGLKHQRVHGKAYDDLLDEFMQAVTDKFGINCLIQFEDFANANAFRLLNKYRNKYCMFNDDIQGTASVAVAGILAALRITNNKLSNHVFVFQGAGEAAMGIAHLLVMALEKEGVPKAEATRKIWMVDSKGLIVKGRSHLNHEKEMFAQDHPEVNSLEEVVRLVKPTAIIGVAAIAGAFTEQILRDMASFHERPIIFALSNPTSKAECTAEKCYRVTEGRGIFASGSPFKSVTLEDGKTFIPGQGNNAYVFPGVALGVIAGGIRHIPDEIFLLTAEQIAQEVSEQHLSQGRLYPPLSTIRDVSLRIAIKVLDYAYKHNLASYYPEPKDKEAFVRSLVYTPDYDSFTLDSYTWPKEAMNVQTV

SEQ ID NO: 5488 - protein, 133 aa, Homo Sapiens
MRKHVLAASFSMLSLLVIMGDTDSKTDSSFIMDSDPRRCMRHHYVDSISHPLYKCSSKMVLLARCEGHCSQASRSEPLVSFSTVLKQPFRSSCHCCRPQTSKLKALRLRCSGGMRLTATYRYILSCHCEECNS

SEQ ID NO: 5489 - protein, 1099 aa, Homo Sapiens
MRMSDTVTVKDETATMKDLEAEVKDTTRVENLIKSENYGKILVEKNEHCIENNIDLQRPLQSFGQTGKRSKSSSKLKLVRSLAVCEESPPPPAPEISQENQEKIQIQLTQSFEKEEKPSKDEAEKEKASDKLPRKMLSRDSSQEYTDSTGIDLHEFLVNTLKNNPRDRMMLLKLEQEILDFIGNNESPRKKFPPMTSYHRMLLHRVAAYFGLDHNVDQSGKSVIVNKTSNTRIPDQKFNEHIKDDKGEDFQKRYILKRDNSSFDKDDNQMRIRLKDDRRSKSIEEREEEYQRARDRIFSQDSLCSQENYIIDKRLQDEDASSTQQRRQIFRVNKDASGRSTNSHQSSTENELKYSEPRPWSSTDSDSSLRNLKPAVTKASSFSGISVLTRGDSSGSSKSIGRLSKTGSESSGSVGSSTGSLSHIQQPLPGTALSQSSHGAPVVYPTVSTHSSLSFDGGLNGQVASPSTSFFLLPLEAAGIPPGSILINPQTGQPFINPDGSPVVYNPPMTQQPVRSQVPGPPQPPLPAPPQQPAANHIFSQDNLGSQFSHMSLARQPSADGSDPHAAMFQSTVVLQSPQQSGYIMTAAPPPHPPPPPPPPPPPPPLPPGQPVPTAGYPASGHPVSQPVLQQQGYIQQPSPQMPACYCAPGHYHSSQPQYRPVPSVHYNSHLNQPLPQPAQQTGYQVIPNQQQNYQGIVGVQQPQSQSLVSGQPNSIGNQIQGVVIPYTSVPTYQVSLPQGSQGIPHQTYQQPVMFPNQSNQGSMPTTGMPVYYSVIPPGQQNNLSSSVGYLQHPGSEQVQFPRTTSPCSSQQLQGHQCTAGPPPPPGGGMVMMQLSVPNNPQSCAHSPPQWKQNKYYCDHQRGQKCVEFSSVDNIVQHSPQLSSPIISPAQSPAPAQLSTLKTVRPSGPPLSIMPQFSRPFVPGQGDSRYPLLGQPLQYNPPAVLHGHIPNQQGQPGSRHGNRGRRQAKKAASTDLGAGETVVGKVLEITELPDGITRMEAEKLFGELFKIGAKIRWLRDPQSQPRRHPLCCGSGDNTANPERSKPSDLASTYTVLATFPSISAAQNALKKQINSVNKFKLRTSKKHYDFHILERASSQ

SEQ ID NO: 5490 - protein, 1228 aa, Homo Sapiens
MKGARLFVLLSSLWSGGIGLNNSKHSWTIPEDGNSQKTMPSASVPPNKIQSLQILPTTRVMSAEIATTPEARTSEDSLLKSTLPPSETSAPAEGVRNQTLTSTEKAEGVVKLQNLTLPTNASIKFNPGAESVVLSNSTLKFLQSFARKSNEQATSLNTVGGTGGIGGVGGTGGVGNRAPRETYLSRGDSSSSQRTDYQKSNFETTRGKNWCAYVHTRLSPTVTLDNQVTYVPGGKGPCGWTGGSCPQRSQKISNPVYRMQHKIVTSLDWRCCPGYSGPKCQLRAQEQQSLIHTNQAESHTAVGRGVAEQQQQQGCGDPEVMQKMTDQVNYQAMKLTLLQKKIDNISLTVNDVRNTYSSLEGKVSEDKSREFQSLLKGLKSKSINVLIRDIVREQFKIFQNDMQETVAQLFKTVSSLSEDLESTRQIIQKVNESVVSIAAQQKFVLVQENRPTLTDIVELRNHIVNVRQEMTLTCEKPIKELEVKQTHLEGALEQEHSRSILYYESLNKTLSKLKEVHEQLLSTEQVSDQKNAPAAESVSNNVTEYMSTLHENIKKQSLMMLQMFEDLHIQESKINNLTVSLEMEKESLRGECEDMLSKCRNDFKFQLKDTEENLHVLNQTLAEVLFPMDNKMDKMSEQLNDLTYDMEILQPLLEQGASLRQTMTYEQPKEAIVIRKKIENLTSAVNSLNFIIKELTKRHNLLRNEVQGRDDALERRINEYALEMEDGLNKTMTIINNAIDFIQDNYALKETLSTIKDNSEIHHKCTSDMETILTFIPQFHRLNDSIQTLVNDNQRYNFVLQVAKTLAGIPRDEKLNQSNFQKMYQMFNETTSQVRKYQQNMSHLEEKLLLTTKISKNFETRLQDIESKVTQTLIPYYISVKKGSVVTNERDQALQLQVLNSRFKALEAKSIHLSINFFSLNKTLHEVLTMCHNASTSVSELNATIPKWIKHSLPDIQLLQKGLTEFVEPIIQIKTQAALSNSTCCIDRSLPGSLANVVKSQKQVKSLPKKINALKKPTVNLTTVLIGRTQRNTDNIIYPEEYSSCSRHPCQNGGTCINGRTSFTCACRHPFTGDNCTIKLVEENALAPDFSKGSYRYAPMVAFFASHTYGMTIPGPILFNNLDVNYGASYTPRTGKFRIPYLGVYVFKYTIESFSAHISGFLVVDGIDKLAFESENINSEIHCDRVLTGDALLELNYGQEVWLRLAKGTIPAKFPPVTTFSGYLLYRT

SEQ ID NO: 5491 - protein, 518 aa, Homo Sapiens
MGALARALLLPLLAQWLLRAAPELAPAPFTLPLRVAAATNRVVAPTPGPGTPAERHADGLALALEPALASPAGAANFLAMVDNLQGDSGRGYYLEMLIGTPPQKLQILVDTGSSNFAVAGTPHSYIDTYFDTERSSTYRSKGFDVTVKYTQGSWTGFVGEDLVTIPKGFNTSFLVNIATIFESENFFLPGIKWNGILGLAYATLAKPSSSLETFFDSLVTQANIPNVFSMQMCGAGLPVAGSGTNGGSLVLGGIEPSLYKGDIWYTPIKEEWYYQIEILKLEIGGQSLNLDCREYNADKAIVDSGTTLLRLPQKVFDAVVEAVARASLIPEFSDGFWTGSQLACWTNSETPWSYFPKISIYLRDENSSRSFRITILPQLYIQPMMGAGLNYECYRFGISPSTNALVIGATVMEGFYVIFDRAQKRVGFAASPCAEIAGAAVSEISGPFSTEDVASNCVPAQSLSEPILWIVSYALMSVCGAILLVLIVLLLLPFRCQRRPRDPEVVNDESSLVRHRWK

SEQ ID NO: 5492 - protein, 114 aa, Homo Sapiens
MSALSLLILGLLTAVPPASCQQGLGNLQPWMQGLIAVAVFLVLVAIAFAVNHFWCQEEPEPAHMILTVGNKADGVLVGTDGRYSSMAASFRSSEHENAYENVPEEEGKVRSTPM

SEQ ID NO: 5493 - protein, 392 aa, Homo Sapiens
MEEQQPEPKSQRDSALGGAAAATPGGLSLSLSPGASGSSGSGSDGDSVPVSPQPAPPSPPAAPCLPPLAHHPHLPPHPPPPPPQHLAAPAHQPQPAAQLHRTTNFFIDNILRPDFGCKKEQPPPQLLVAAAARGGAGGGGRVERDRGQTAAGRDPVHPLGTRAPGAASLLCAPDANCGPPDGSQPAAAGAGASKAGNPAAAAAAAAAAVAAAAAAAAAKPSDTGGGGSGGGAGSPGAQGTKYPEHGNPAILLMGSANGGPVVKTDSQQPLVWPAWVYCTRYSDRPSSGPRTRKLKKKKNEKEDKRPRTAFTAEQLQRLKAEFQANRYITEQRRQTLAQELSLNESQIKIWFQNKRAKIKKATGIKNGLALHLMAQGLYNHSTTTVQDKDESE

SEQ ID NO: 5494 - protein, 132 aa, Homo Sapiens
MSNKFLGTWKLVSSENFDDYMKALGVGLATRKLGNLAKPTVIISKKGDIITIRTESTFKNTEISFKLGQEFEETTADNRKTKSIVTLQRGSLNQVQRWDGKETTIKRKLVNGKMVAECKMKGVVCTRIYEKV

SEQ ID NO: 5495 - protein, 269 aa, Homo Sapiens
DAWAVKEECRLLNAPPVPPRGGNGSGRLSSSPPVPPRFPKLQPVHSPSSSLSYYSSGLQDGAGSRSGSGSPSPDTYSLYCYPCTWGDCKEPVLEPFDPFELGQGSSPEPELLRSQEPRAVGTPGPGPRLSPLGPSKAFEPEGLVLHQVPTPLSPAALQGPEAGGALFLTQGRLEGPPASPRDGATGFGVRDASSWQPPADLSALSLEEVSRSLRFIGLSEDVVSFFARERIDGSIFVQLSEDILADDFHLTKLQVKKIMQFIKGWRPKI

SEQ ID NO: 5496 - protein, 325 aa, Homo Sapiens
MQGRVAGSCAPLGLLLVCLHLPGLFARSIGVVEEKVSQNLGTNLPQLGQPSSTGPSNSEHPQPALDPRSNDLARVPLKLSVPASDGFPPAGGSAVQRWPPSWGLPAMDSWPPEDPWQMMAAAAEDRLGEALPEELSYLSSAAALAPGSGPLPGESSPDATGLSPEASLLHQDSESRRLPRSNSLGAGGKILSQRPPWSLIHRVLPDHPWGTLNPSVSWGGGGPGTGWGTRPMPHPEGIWGINNQPPGTSWGNINRYPGGSWGNINRYPGGSWGNINRYPGGSWGNIHLYPGINNPFPPGVLRPPGSSWNIPAGFPNPPSPRLQWG

SEQ ID NO: 5497 - protein, 990 aa, Homo Sapiens
ANSFDDRFLVTAGADGNIFVFNIFSEFMLRKDMKAKVPSPRFGIETEPIPEDIEDPKAYSIENARRKREHDKLMKEVGEIKARKREQIKALRSEFCNLLEMNEKLPKHMQFKRTDFDVDSQIRAEMHRKTAFKIQQVEKELAWEKEKHELGLMKLKNRFRDPLESDTIVVHAILSDHKISSYRLVQPSKYSKFKRASQSERKPSKLDRFEKEGPGRKDSQRDAGGSVTIQEESIIEKGKKFRPKTLSEIIVENQIEKTRKLILKAERAQLKIQQRKKEWEELYKSKPGDDYEDPKDLQAIKEAQVYMGDFNLKTAPDYKIPEHMRINAAKKEEELGHLDSLVHGNKRHMNKCILSLRDLKVAVVEEIQCLVQELKNIQSTLHISKHIPIPKIPQIHPEEVPEKRFQYDEETLLNFKQQQMKSKDEKSPGVEQTGSGGPVGGFLKLSSRKDGDLTTRDSISRSSKASTFSLDIPKCLEFEKAEPTDVELEIMKRDEIKHVYMQQYLVNRIKELVVTFDAELRLLRHQKLKLDTQMKLSDLHHVTLFQEILLLKNFEKQENILQERVNSLDKEEQYMQWKINETLKEMEEKKNEITKLQEQEKALYAGFQAAIGENNKFANFLMKVLKKKIKRVKKKEVEGDADEDEESEESSEEESSLESDEDESESEDEVFDDSICPTNCDVALFELALHLREKRLDIEEALVEEKKIVDNLKKEYDTLSKKVKIVATNLNAAEEALEAYQREKQQRLNELLVVIPLKPHQIEYVVFGEIPSDLSGTLVFSNHALRRLQERIRELQEENSKQQKLNKEWRERRKQLIREKREMTKTIHKMEETVRQLMISKFGRVVNLEALQMLSVNTTLEELKIRKLRKELANAKEMKMWEEKIAQMRWELMMKTKEHTRKLYQMNDLCIEKKKLDSRLNTLQNQQGNAFQGPREADVVAREEVTELIQLQAERISALKEEIALLRRKGGLILPPIQSPREKEIQPADL

SEQ ID NO: 5498 - protein, 829 aa, Homo Sapiens [sequence omitted]

SEQ ID NO: 5499 - protein, 912 aa, Homo Sapiens
MSAPPVLRPPSPLLPVAAAAAAAAAALVPGSGPGPAPFLAPVAAPVGGISFHLQIGLSREPVLLLQDSSGDYSLAHVREMACSIVDQKFPECGFYGMYDKILLFRHDPTSENILQLVKAASDIQEGDLIEVVLSRSATFEDFQIRPHALFVHSYRAPAFCDHCGEMLWGLVRQGLKCEGCGLNYHKRCAFKIPNNCSGVRRRRLSNVSLTGVSTIRTSSAELSTSAPDEPLLQKSPSESFIGREKRSNSQSYIGRPIHLDKILMSKVKVPHTFVIHSYTRPTVCQYCKKLLKGLFRQGLQCKDCRFNCHKRCAPKVPNNCLGEVTINGDLLSPGAESDVVMEEGSDDNDSERNSGLMDDMEEAMVQDAEMAMAECQNDSGEMQDPDPDHEDANRTISPSTSNNIPLMRVVQSVKHTKRKSSTVMKEGWMVHYTSKDTLRKRHYWRLDSKCITLFQNDTGSRYYKEIPLSEILSLEPVKTSALIPNGANPHCFEITTANVVYYVGENVVNPSSPSPNNSVLTSGVGADVARMWEIAIQHALMPVIPKGSSVGTGTNLHRDISVSISVSNCQIQENVDISTVYQIFPDEVLGSGQFGIVYGGKHRKTGRDVAIKIIDKLRFPTKQESQLRNEVAILQNLHHPGVVNLECMFETPERVFVVMEKLHGDMLEMILSSEKGRLPEHITKFLITQILVALRHLHFKNIVHCDLKPENVLLASADPFPQVKLCDFGFARIIGEKSFRRSVVGTPAYLAPEVLRNKGYNRSLDMWSVGVIIYVSLSGTFPFNEDEDIHDQIQNAAFMYPPNPWKEISHEAIDLINNLLQVKMRKRYSVDKTLSHPWLQDYQTWLDLRELECKIGERYITHESDDLRWEKYAGEQRLQYPTHLINPSASHSDTPETEETEMKALGERVSIL

SEQ ID NO: 5500 - protein, 235 aa, Homo Sapiens
MRLKLFSILSTVLLRATDTINSQGQFPSYLETVTKDILAPNLQWHAGRTAAAIRTAAVSCLWALTSSEVLSAEQIRDVQETLMPQVLTTLEEDSKMTRLISCRIINTFLKTSGGMTDPEKLIKIYPELLKRLDDVSNDVRMAAASTLVTWLQCVKGANAKSYYQSSVQYLYRELLVHLDDPERAIQDAILEVLKEGSGLFPDLLVRETEAVIHKHRSATYCEQLLQHVQAVPATQ

SEQ ID NO: 5501 - protein, 318 aa, Homo Sapiens
MPNIVLFSGSSHQDLSQRVADRLGLELGKVVTKKFSNQETSVEIGESVRGEDVYIIQSGCGEINDNLMELLIMINACKIASSSRVTAVIPCFPYARQDKKDKSRAPISAKLVANMLSVAGADHIITMDLHASQIQGFFDIPVDNLYAEPAVLQWIRENIAEWKNCIIVSPDAGGAKRVTSIADRLNVEFALIHKERKKANEVDRMVLVGDVKDRVAILVDDMADTCGTICHAADKLLSAGATKVYAILTHGIFSGPAISRINNAAFEAVVVTNTIPQEDKMKHCTKIQVIDISMILAEAIRRTHNGESVSYLFSHVPL

SEQ ID NO: 5502 - protein, 456 aa, Homo Sapiens
MKIEEVKSTTKTQRIASHSHVKGLGLDESGLAKQAASGLVGQENAREACGVIVELIKSKKMAGRAVLLAGPPGTGKTALALAIAQELGSKVPFCPMVGSEVYSTEIKKTEVLMENFRRAIGLRIKETKEVYEGEVTELTPCETENPMGGYGKTISHVIIGLKTAKGTKQLKLDPSIFESLQKERVEAGDVIYIEANSGAVKRQGRCDTYATEFDLEAEEYVPLPKGDVHKKKEIIQDVTLHDLDVANARPQGGQDILSMMGQLMKPKKTEITDKLRGEINKVVNKYIDQGIAELVPGVLFVDEVHMLDIECFTYLHRALESSIAPIVIFASNRGNCVIRGTEDITSPHGIPLDLLDRVMIIRTMLYTPQEMKQIIKIRAQTEGINISEEALNHLGEIGTKTTLRYSVQLLTPANLLAKINGKDSIEKEHVEEISELFYDAKSSAKILADQQDKYMK

SEQ ID NO: 5503 - protein, 408 aa, Homo Sapiens
SSLGLSLGSNSTVTASTRSSVATTSGKAPPNLPPGVPPLLPNPYIMAPGLLHAYPPQVYGYDDLQMLQTRFPLDYYSIPFPTPTTPLTGRDGSLASNPYSGDLTKFGRGDASSPAPATTLAQPQQNQTQTHHTTQQTFLNPALPPGYSYTSLPYYTGVPGLPSTFQYGPAVFPVAPTSSKQHGVNVSVNASATPFQQPSGYGSHGYNTGVSVTSSNTGVPDISGSVYSKTQQSFEKQGFHSGTPAASFNLPSALGSGGPINPATAAAYPPAPFMHILTPHQQPHSQILHHHLQQDGQLPYLQMILCCQRQQEEQTGSGQRSQTSSIPQKPQTNKSAYNSYSWGPTEALTLFSRSHLLRGLLSLETMETASKRKECGGFPLPPTPSGPPHASASCLSHSYTIPTLLYVL

SEQ ID NO: 5504 - protein, 158 aa, Homo Sapiens
KFIELLDTIFFVLRKKNSQVTFLHVFHHTIMPWTWWFGVKFAAGGLGTFHALLNTAVHVVMYSYYGLSALGPAYQKYLWWKKYLTSLQLVQFVIVAIHISQFFFMEDCKYQFPVFACIIMSYSFMFLLLFLHFWYRAYTKGQRLPKTVKNGTCKNKDN

SEQ ID NO: 5505 - protein, 759 aa, Homo Sapiens
MAGLTLFVGRLPPSARSEQLEELFSQVGPVKQCFVVTEKGSKACRGFGYVTFSMLEDVQRALKEITTFEGCKINVTVAKKKLRNKTKEKGKNENSECPKKEPKAKKAKVADKKARLIIRNLSFKCSEDDLKTVFAQFGAVLEVNIPRKPDGKMRGFGFVQFKNLLEAGKALKGMNMKEIKGRTVAVDWAVAKDKYKDTQSVSAIGEEKSHESKHQESVKKKGREEEDMEEEENDDDDDDDDEEDGVFDDEDEEEENIESKVTKPVQIQKRAVKRPAPAKSSDHSEEDSDLEESDSIDDGEELAQSDTSTEEQEDKAVQVSNKKKRKLPSDVNEGKTVFIRNLSFDSEEEELGELLQQFGELKYVRIVLHPDTEHSKGCAFAQFMTQEAAQKCLLAASPENEAGGLKLDGRQLKVDLAVTRDEAAKLQTTKVKKPTGTRNLYLAREGLIRAGTKAAEGVSAADMAKRERFELLKHQKLKDQNIFVSRTRLCLHNLPKAVDDKQLRKLLLSATSGEKGVRIKECRVMRDLKGVHGNMKGQSLGYAFAEFQEHEHALKALRLINNNPEIFGPLKRPIVEFSLEDRRKLKMKELRIQRSLQKMRSKPATGEPQKGQPEPAKDQQQKAAQHHTEEQSKVPPEQKRKAGSTSWTGFQTKAEVEQVELPDGKKRRKVLALPSHRGPKIRLRDKGKVKPVHPKKPKPQINQWKQEKQQLSSEQVSRKKAKGNKTETRFNQLVEQYKRKLLGPSKGAPLAKRSKWFDS

SEQ ID NO: 5506 - protein, 110 aa, Homo Sapiens
MPAAWILWAHSHSELHTVMETPLEKALTTMVTTFHKYSGREGSKLTLSRKELKELIKKELCLGEMKESSIDDLMKSLDKNSDQEIDFKEYSVFLTMLCMAYNDFFLEDNK

SEQ ID NO: 5507 - protein, 514 aa, Homo Sapiens
MAVWLAQWLGPLLLVSLWGLLAPASLLRRLGEHIQQFQESSAQGLGLSLGPGAAALPKVGWLEQLLDPFNVSDRRSFLQRYWVNDQHWVGQDGPIFLHLGGEGSLGPGSVMRGHPAALAPAWGALVISLEHRFYGLSIPAGGLEMAQLRFLSSRLALADVVSARLALSRLFNISSSSPWICFGGSYAGSLAAWARLKFPHLIFASVASSAPVRAVLDFSEYNDVVSRSLMSTAIGGSLECRAAVSVAFAEVERRLRSGGAAQAALRTELSACGPLGRAENQAELLGALQALVGGVVQYDGQTGAPLSVRQLCGLLLGGGGNRSHSTPYCGLRRAVQIVLHSLGQKCLSFSRAETVAQLRSTEPQLSGVGDRQWLYQTCTEFGFYVTCENPRCPFSQLPALPSQLDLCEQVFGLSALSVAQAVAQTNSYYGGQTPGANKVLFVNGDTDPWHVLSVTQALGSSESTLLIRTGSHCLDMAPERPSDSPSLRLGRQNIFQQLQTWLKLAKESQIKGEV

SEQ ID NO: 5508 - protein, 2089 aa, Homo Sapiens
MEDTQAIDWDVEEEEETEQSSESLRCNVEPVGRLHIFSGAHGPEKDFPLHLGKNVVGRMPDCSVALPFPSISKQHAEIEILAWDKAPILRDCGSLNGTQILRPPKVLSPGVSHRLRDQELILFADLLCQYHRLDVSLPFVSRGPLTVEETPRVQGETQPQRLLLAEDSEEEVDFLSERRMVKKSRTTSSSVIVPESDEEGHSPVLGGLGPPFAFNLNSDTDVEEGQQPATEEASSAARRGATVEAKQSEAEVVTEIQLEKDQPLVKERDNDTKVKRGAGNGVVPAGVILERSQPPGEDSDTDVDDDSRPPGRPAEVHLERAQPFGFIDSDTDAEEERIPATPVVIPMKKRKIFHGVGTRGPGAPGLAHLQESQAGSDTDVEEGKAPQAVPLEKSQASMVINSDTDDEEEVSAALTLAHLKESQPAIWNRDAEEDMPQRVVLLQRSQTTTERDSDTDVEEEELPVENREAVLKDHTKIRALVRAHSEKDQPPFGDSDDSVEADKSSPGIHLERSQASTTVDINTQVEKEVPPGSAIMHIKKHQVSVEGTNQTDVKAVGGPAKLLVVSLEEAWPLHGDCETDAEEGTSLTASVVADVRKSQLPAEGDAGAEWAAAVLKQERAHEVGAQGGPPVAQVEQDLPISRENLTDLVVDTDTLGESTQPQREGAQVPTGREREQHVGGTKDSEDNYGDSEDLDLQATQCFLENQGLEAVQSMEDEPTQAFMLTPPQELGPSHCSFQTTGTLDEPWEVLATQPFCLRESEDSETQPFDTHLEAYGPCLSPPRAIPGDQHPESPVHTEPMGIQGRGRQTVDKVMGIPKETAERVGPERGPLERETEKLLPERQTDVTGEEELTKGKQDREQKQLLARDTQRQESDKNGESASPERDRESLKVEIETSEEIQEKQVQKQTLPSKAFEREVERPVANRECDPAELEEKVPKVILERDTQRGEPEGGSQDQKGQASSPTPEPGVGAGDLPGPTSAPVPSGSQSGGRGSPVSPRRHQKGLLNCKMPPAEKASRIRAAEKVSRGDQESPDACLPPAVPEAPAPPQKPLNSQSQKHLAPPPLLSPLLPSIKPTVRKTRQDGSQEAPEAPLSSELEPFHPKPKIRTRKSSRMTPFPATSAAPEPHPSTSTAQPVTPKPTSQATRSRTNRSSVKTPEPVVPTAPELQPSTSTDQPVTSEPTSQVTRGRKSRSSVKTPETVVPTALELQPSTSTDRPVTSEPTSQATRGRKNRSSVKTPEPVVPTAPELQPSTSTDQPVTSEPTYQATRGRKNRSSVKTPEPVVPTAPELRPSTSTDRPVTPKPTSRTTRSRTNMSSVKTPETVVPTAPELQISTSTDQPVTPKPTSRTTRSRTNMSSVKNPESTVPIAPELPPSTSTEQPVTPEPTSRATRGRKNRSSGKTPETLVPTAPKLEPSTSTDQPVTPEPTSQATRGRTNRSSVKTPETVVPTAPELQPSTSTDQPVTPEPTSQATRGRTDRSSVKTPETVVPTAPELQASASTDQPVTSEPTSRTTRGRKNRSSVKTPETVVPAAPELQPPTSTDRPVTPEPTSRATRGRTNRSSVKTPESIVPIAPELQPSTSRNQLVTPEPTSRATRCRTNRSSVKTPEPVVPTAPEPHPTTSTDQPVTPKLTSRATRRKTNRSSVKTPKPVEPAASDLEPFTPTDQSVTPEAIAQGGQSKTLRSSTVRAMPVPTTPEFQSPVTTDQPISPEPITQPSCIKRQRAAGNPGSLAAPIDHKPCSAPLEPKSQASRNQRWGAVRAAESLTAIPEPASPQLLETPIHASQIQKVEPAGRSRFTPELQPKASQSRKRSLATMDSPPHQKQPQRGEVSQKTVIIKEEEEDTAEKPGKEEDVVTPKPGKRKRDQAEEEPNRIPSRSLRRTKLNQESTAPKVLFTGVVDARGERAVLALGGSLAGSAAEASHLVTDRIRRTVKFLCALGRGIPILSLDWLHQSRKAGFFLPPDEYVVTDPEQEKNFGFSLQDALSRARERRLLEGYEIYVTPGVQPPPPQMGEIISCCGGTYLPSMPRSYKPQRVVITCPQDFPHCSIPLRVGLPLLSPEFLLTGVLKQEAKPEAFVLSPLEMSST

SEQ ID NO: 5509 - protein, 264 aa, Homo Sapiens
MTKFSSFSLFFLIVGAYMTHVCFNMEIIGGKEVSPHSRPFMASIQYGGHHVCGGVLIDPQWVLTAAHCQYRFTKGQSPTVVLGAHSLSKNEASKQTLEIKKFIPFSRVTSDPQSNDIMLVKLQTAAKLNKHVKMLHIRSKTSLRSGTKCKVTGWGATDPDSLRPSDTLREVTVTVLSRKLCNSQSYYNGDPFITKDMVCAGDAKGQKDSCKGDSGGPLICKGVFHAIVSGGHECGVATKPGIYTLLTKKYQTWIKSNLVPPHTN

SEQ ID NO: 5510 - protein, 358 aa, Homo Sapiens
MAPQNLSTFCLLLLYLIGAVIAGRDFYKILGVPRSASIKDIKKAYRKLALQLHPDRNPDDPQAQEKFQDLGAAYEVLSDSEKRKQYDTYGEEGLKDGHQSSHGDIFSHFFGDFGFMFGGTPRQQDRNIPRGSDIIVDLEVTLEEVYAGNFVEVVRNKPVARQAPGKRKCNCRQEMRTTQLGPGRFQMTQEVVCDECPNVKLVNEERTLEVEIEPGVRDGMEYPFIGEGEPHVDGEPGDLRFRIKVVKHPIFERRGDDLYTNVTISLVESLVGFEMDITHLDGHKVHISRDKITRPGAKLWKKGEGLPNFDNNNIKGSLIITFDVDFPKEQLTEEAREGIKQLLKQGSVQKVYNGLQGY

SEQ ID NO: 5511 - protein, 80 aa, Homo Sapiens
MGRAMVARLGLGLLLLALLLPTQIYSSETTTGTSSNSSQSTSNSGLAPNPTNATTKAAGGALQSTASLFVVSLSLLHLYS

SEQ ID NO: 5512 - protein, 429 aa, Homo Sapiens
MARGLGGPHWVAVGLLTWATLGLLVAGLGGHDDLHDDLQEDFHGHSHRHSHEDFHHGHSHAHGHGHTHESIWHGHTHDHDHGHSHEDLHHGHSHGYSHESLYHRGHGHDHEHSHGGYGESGAPGIKQDLDAVTLWAYALGATVLISAAPFFVLFLIPVESNSPRHRSLLQILLSFASGGLLGDAFLHLIPHALEPHSHHTLEQPGHGHSHSGQGPILSVGLWVLSGIVAFLVVEKFVRHVKGGHGHSHGHGHAHSHTRGSHGHGRQERSTKEKQSSEEEGKETRGVQKRRGGSTVPKDGPVRPQNAEEEKRGLDLRVSGYLNLAADLAHNFTDGLAIGASFRGGRGLGILTTMTVLLHEVPHEVGDFAILVQSGCTKKQAMRLQLLTAVGALAGTAVPFSLKEEQWTVKLQVVQVLAGSCHLLQVALST

SEQ ID NO: 5513 - protein, 577 aa, Homo Sapiens
MSHQPLSCLTEKEDSPSESTGNGPPHLAHPNLDTFTPEELLQQMKELLTENHQLKEAMKLNNQAMKGRFEELSAWTEKQKEERQFFEIQSKEAKERLMALSHENEKLKEELGKLKGKSERSSEDPTDDSRLPRAEAEQEKDQLRTQVVRLQAEKADLLGIVSELQLKLNSSGSSEDSFVEIRMAEGEAEGSVKEIKHSPGSTRTVSTGTALSHYRRRSADGAKNYFEHEELTVSQLLLCLREGNQKVERLEVALKEAKERVSDFEKKTSNRSEIETQTEGSTEKENDEEKGPETVGSEVEALNLQVTSLFKELQEAHTKLSEAELMKKRLQEKCQALERKNSAIPSELNEKQELVYPNKKLELQVESMLSEIKMEQAKTEDEKSKLTVLQMTHNKLLQEHNNALKTIEELTRKESEKVDRAVLKELSEKLELAEKALASKQLQMDEMKQTIAKQEEDLETMTILRAQMEVYCSDFHAERAAREKIHEEKEQLALQLAVLLKENDAFEDGGRQSLMEMQSRHGARTSDSDQQAYLVQRGAEDRDWRQQRNIPIHSCPKCGEVLPDIDTLQIHVMDCII

SEQ ID NO: 5514 - protein, 503 aa, Homo Sapiens
MLSQLAMLQGSLLLVVATMSVAQQTRQEADRGCETLVVQHGHCSYTFLLPKSEPCPPGPEVSRDSNTLQRESLANPLHLGKLPTQQVKQLEQALQNNTQWLKKLERAIKTILRSKLEQVQQQMAQNQTAPMLELGTSLLNQTTAQIRKLTDMEAQLLNQTSRMDAQMPETFLSTNKLENQLLLQRQKLQQLQGQNSALEKRLQALETKQQEELASILSKKAKLLNTLSRQSAALTNIERGLRGVRHNSSLLQDQQHSLRQLLVLLRHLVQERANASAPAFIMAGEQVFQDCAEIQRSGASASGVYTIQVSNATKPRKVFCDLQSSGGRWTLIQRRENGTVNFQRNWKDYKQGFGDPAGEHWLGNEVVHQLTRRAAYSLRVELQDWEGHEAYAQYEHFHLGSENQLYRLSVVGYSGSAGRQSSLVLQNTSFSTLDSDNDHCLCKCAQVMSGGWWFDACGLSNLNGVYYHAPDNKYKMDGIRWHYFKGPSYSLRASRMMIRPLDI

SEQ ID NO: 5515 - protein, 352 aa, Homo Sapiens
MKPALLEVMRMNRICRMVLATCLGSFILVIFYFQSMLHPVMRRNPFGVDICCRKGSRSPLQELYNPIQLELSNTAVLHQMRRDQVTDTCRANSATSRKRRVLTPNDLKHLVVDEDHELIYCYVPKVACTNWKRLMMVLTGRGKYSDPMEIPANEAHVSANLKTLNQYSIPEINHRLKSYMKFLFVREPFERLVSAYRNKFTQKYNISFHKRYGTKIIKRQRKNATQEALRKGDDVKFEEFVAYLIDPHTQREEPFNEHWQTVYSLCHPCHIHYDLVGKYETLEEDSNYVLQLAGVGSYLKFPTYAKSTRTTDEMTTEFFQNISSEHQTQLYEVYKLDFLMFNYSVPSYLKLE

SEQ ID NO: 5516 - protein, 557 aa, Homo Sapiens
MAAFLKNVCLGLEDLQYVFMISSHELFITLLKDEERKLLVDQMRKRSPRVNLCIKPVTSFYDIPASASVNIGQLEHQLILSVDPWRIRQILIELHGMTSERQFWTVSNKWEVPSVYSGVILGIKDNLTRDLVYILMAKGLHCSTVKDFSHAKQLFAACLELVTEFSPKLRQVMLNEMLLLDIHTHEAGTGQAGERPPSDLISRVRGYLEMRLPDIPLRQVIAEECVAFMLNWRENEYLTLQVPAFLLQSNPYVKLGQLLAATCKELPGPKESRRTAKDLWEVVVQICSVSSQHKRGNDGRVSLIKQRESTLGIMYRSELLSFIKKLREPLVLTIILSLFVKLHNVREDIVNDITAEHISIWPSSIPNLQSVDFEAVAITVKELVRYTLSINPNNHSWLIIQADIYFATNQYSAALHYYLQAGAVCSDFFNKAVPPDVYTDQVIKRMIKCCSLLNCHTQVAILCQFLREIDYKTAFKSLQEQNSHDAMDSYYDYIWDVTILEYLTYLHHKRGETDKRQIAIKAIGQTELNASNPEEVLQLAAQRRKKKFLQAMAKLYF

SEQ ID NO: 5517 - protein, 312 aa, Homo Sapiens
MESALPAAGFLYWVGAGTVAYLALRISYSLFTALRVWGVGNEAGVGPGLGEWAVVTGSTDGIGKSYAEELAKHGMKVVLISRSKDKLDQVSSEIKEKFKVETRTIAVDFASEDIYDKIKTGLAGLEIGILVNNVGMSYEYPEYFLDVPDLDNVIKKMININILSVCKMTQLVLPGMVERSKGAILNISSGSGMLPVPLLTIYSATKTFVDFFSQCLHEEYRSKGVFVQSVLPYFVATKLAKIRKPTLDKPSPETFVKSAIKTVGLQSRTNGYLIHALMGSIISNLPSWIYLKIVMNMNKSTRAHYLKKTKKN

SEQ ID NO: 5518 - protein, 2724 aa, Homo Sapiens
MNGHRFTFRTRSLLPLQKGQHRCITKLLAHNDPWGIFRAPSSRRSYSVSGVCQPAIPNSSLHIPHNACWLKWKLCSEIALPYHHILGERRKLCSIRKFEHWREDVRSCCQARVLPRGRTLGLWLALIGREEFAMNLLRRSGKRRRSESGSDSFSGSGGDSSASPQFLSGSVLSPPPGLGRCLKAAAAGECKPTVPDYEIDKLLLANWGLPKAVLEKYHSFGVKKMFEWQAECLLLGQVLEGKNLVYSAPTSAGKTLVAELLILKRVLEMRKKALFILPFVSVAKEKKYYLQSLFQEVGIKVDGYMGSTSPSRHFSSLDIAVCTIERANGLINRLIEENKMDLLGMVVVDELHMLGDSHRGYLLELLLTKICYITRKSASCQADLASSLSNAVQIVGMSATLPNLELVASWLNAELYHTDFRPVPLLESVKVGNSIYDSSMKLVREFEPMLQVKGDEDHVVSLCYETICDNHSVLLFCPSKKWCEKLADIIAREFYNLHHQAEGEGLVKPSECPPVILEQKELLEVMDQLRRLPSGLDSVLQKTVPWGVAFHHAGLTFEERDIIEGAFRQGLIRVLAATSTLSSGVNLPARRVIIRTPIFGGRPLDILTYKQMVGRAGRKGVDTVGSILICKNSEKSKGIALLQGSLKPVRSCLQRREGEEVTGSMIRAILEIIVGGVASTSQDMHTYAACTFLAASMKEGKQGIQRNQESVQLGAIEACVMWLLENEFIQSTEASDGTEGKVYHPTHLGSATLSSSLSPADTLDIFADLQRAMKGFVLENDLHILYLVTPMFEDWTTIDWYRFFCLWEKLPTSMKRVAELVGVEEGFLARCVKGKVVARTERQHRQMAIHKRFFTSLVLLDLISEVPLREINQKYGCNRGQIQSLQQSAAVYAGMITVFSNRLGWHNMELLLSQFQKRLTFGIQRELCDLVRVSLLNAQRARVLYASGFHTVADLARANIVEVEVILKNAVPFKSARKAVDEEEEAVEERRNMRTIWVTGRKGLTEREAAALIVEEARMILQQDLVEMGVQWNPCALLHSSTCSLTHSESEVKEHTFISQTKSSYKKLTSKNKSNTIFSDSYIKHSPNIVQDLNKSREHTSSFNCNFQNGNQEHQTCSIFRARKRASLDINKEKPGASQNEGKTSDKKVVQTFSQKTKKAPLNFNSEKMSRSFRSWKRRKHLKRSRDSSPLKDSGACRIHLQGQTLSNPSLCEDPFTLDEKKTEFRNSGPFAKNVSLSGKEKDNKTSFPLQIKQNCSWNITLTNDNFVEHIVTGSQSKNVTCQATSVVSEKGRGVAVEAEKINEVLIQNGSKNQNVYMKHHDIHPINQYLRKQSHEQTSTITKQKNIIERQMPCEAVSSYINRDSNVTINCERIKLNTEENKPSHFQALGDDISRTVIPSEVLPSAGAFSKSEGQHENFLNISRLQEKTGTYTTNKTKNNHVSDLGLVLCDFEDSFYLDTQSEKIIQQMATENAKLGAKDTNLAAGIMQKSLVQQNSMNSFQKECHIPFPAEQHPLGATKIDHLDLKTVGTMKQSSDSHGVDILTPESPIFHSPILLEENGLFLKKNEVSVTDSQLNSFLQGYQTQETVKPVILLIPQKRTPTGVEGECLPVPETSLNMSDSLLFDSFSDDYLVKEQLPDMQMKEPLPSEVTSNHFSDSLCLQEDLIKKSNVNENQDTHQQLTCSNDESIIFSEMDSVQMVEALDNVDIFPVQEKNHTVVSPRALELSDPVLDEHHQGDQDGGDQDERAEKSKLTGTRQNHSFIWSGASFDLSPGLQRILDKVSSPLENEKLKSMTINFSSLNRKNTELNEEQEVISNLETKQVQGISFSSNNEVKSKIEMLENNANHDETSSLLPRKESNIVDDNGLIPPTPIPTSASKLTFPGILETPVNPWKTNNVLQPGESYLFGSPSDIKNHDLSPGSRNGFKDNSPISDTSFSLQLSQDGLQLTPASSSSESLSIIDVASDQNLFQTFIKEWRCKKRFSISLACEKIRSLTSSKTATIGSRFKQASSPQEIPIRDDGFPIKGCDDTLVVGLAVCWGGRDAYYFSLQKEQKHSEISASLVPPSLDPSLTLKDRMWYLQSCLRKESDKECSVVIYDFIQSYKILLLSCGISLEQSYEDPKVACWLLDPDSQEPTLHSIVTSFLPHELPLLEGMETSQGIQSLGLNAGSEHSGRYRASVESILIFNSMNQLNSLLQKENLQDVFRKVEMPSQYCLALLELNGIGFSTAECESQKHIMQAKLDAIETQAYQLAGHSFSFTSSDDIAEVLFLELKLPPNREMKNQGSKKTLGSTRRGIDNGRKLRLGRQFSTSKDVLNKLKALHPLPGLILEWRRITNAITKVVFPLQREKCLNPFLGMERIYPVSQSHTATGRITFTEPNIQNVPRDFEIKMPTLVGESPPSQAVGKGLLPMGRGKYKKGFSVNPRCQAQMEERAADRGMPFSISMRHAFVPFPGGSILAADYSQLELRILAHLSHDRRLIQVLNTGADVFRSIAAEWKMIEPESVGDDLRQQAKQICYGIIYGMGAKSLGEQMGIKENDAACYIDSFKSRYTGINQFMTETVKNCKRDGFVQTILGRRRYLPGIKDNNPYRKAHAERQAINTIVQGSAADIVKIATVNIQKQLETFHSTFKSHGHREGMLQSDRTGLSRKRKLQGMFCPIRGGFFILQLHDELLYEVVEEDVVQVAQIVKNEMESAVKLSVKLKVKVKIGASWGELKDFDV

SEQ ID NO: 5519 - protein, 380 aa, Homo Sapiens
MCPMLLKNGYNGNATPVTTTAPWASLGLSAKTCNNVSFEESRIVLVVVYSAVCTLGVPANCLTAWLALLQVLQGNVLAVYLLCLALCELLYTGTLPLWVIYIRNQHRWTLGLLACKVTAYIFFCNIYVSILFLCCISCDRFVAVVYALESRGRRRRRTAILISACIFILVGIVHYPVFQTEDKETCFDMLQMDSRIAGYYYARFTVGFAIPLSIIAFTNHRIFRSIKQSMGLSAAQKAKVKHSAIAVVVIFLVCFAPYHLVLLVKAAAFSYYRGDRNAMCGLEERLYTASVVFLCLSTVNGVADPIIYVLATDHSRQEVSRIHKGWKEWSMKTDVTRLTHSRDTEELQSPVALADHYTFSRPVHPPGSPCPAKRLIEESC

SEQ ID NO: 5520 - protein, 150 aa, Homo Sapiens
MAARGVIAPVGESLRYAEYLQPSAKRPDADVDQQGLVRSLIAVGLGVAALAFAGRYAFRIWKPLEQVITETAKKISTPSFSSYYKGGFEQKMSRREAGLILGVSPSAGKAKIRTAHRRVMILNHPDKGGSPYVAAKINEAKDLLETTTKH

SEQ ID NO: 5521 - protein, 175 aa, Homo Sapiens [sequence omitted]

SEQ ID NO: 5522 - protein, 726 aa, Homo Sapiens [sequence omitted]

SEQ ID NO: 5523 - protein, 417 aa, Homo Sapiens
MAVSLTAAETLALQGTQGQEKMMMMGPKEEEQSCEYETRLPGNHSTSQEIFRQRFRHLRYQETPGPREALSQLRVLCCEWLRPEKHTKEQILEFLVLEQFLTILPEELQSWVRGHHPKSGEEAVTVLEDLEKGLEPEPQVPGPAHGPAQEEPWEKKESLGAAQEALSIQLQPKETQPFPKSEQVYLHFLSVVTEDGPEPKDKGSLPQPPITEVESQVFSEKLATDTSTFEATSEGTLELQQRNPKAERLRWSPAQEESFRQMVVIHKEIPTGKKDHECSECGKTFIYNSHLVVHQRVHSGEKPYKCSDCGKTFKQSSNLGQHQRIHTGEKPFECNECGKAFRWGAHLVQHQRIHSGEKPYECNECGKAFSQSSYLSQHRRIHSGEKPFICKECGKAYGWCSELIRHRRVHARKEPSH

SEQ ID NO: 5524 - protein, 403 aa, Homo Sapiens
MYSGNRSGGHGYWDGGGAAGAEGPAPAGTLSPAPLFSPGTYERLALLLGSIGLLGVGNNLLVLVLYYKFQRLRTPTHLLLVNISLSDLLVSLFGVTFTFVSCLRNGWVWDTVGCVWDGFSGSLFGIVSIATLTVLAYERYIRVVHARVINFSWAWRAITYIWLYSLAWAGAPLLGWNRYILDVHGLGCTVDWKSKDANDSSFVLFLFLGCLVVPLGVIAHCYGHILYSIRMLRCVEDLQTIQVIKILKYEKKLAKMCFLMIFTFLVCWMPYIVICFLVVNGHGHLVTPTISIVSYLFAKSNTVYNPVIYVFMIRKFRRSLLQLLCLRLLRCQRPAKDLPAAGSEMQIRPIVMSQKDGDRPKKKVTFNSSSIIFIITSDESLSVDDSDKTIGVQSLMLIQVRPL

SEQ ID NO: 5525 - protein, 318 aa, Homo Sapiens
MLSESSSFLKGVMLGSIFCALITMLGHIRIGHGNRMHHHEHHHLQAPNKEDILKISEDERMELSKSFRVYCIILVKPKDVSLWAAVKETWTKHCDKAEFFSSENVKVFESINMDTNDMWLMMRKAYKYAFDKYRDQYNWFFLARPTTFAIIENLKYFLLKKDPSQPFYLGHTIKSGDLEYVGMEGGIVLSVESMKRLNSLLNIPEKCPEQGGMIWKISEDKQLAVCLKYAGVFAENAEDADGKDVFNTKSVGLSIKEAMTYHPNQVVEGCCSDMAVTFNGLTPNQMHVMMYGVYRLRAFGHIFNDALVFLPPNGSDND

SEQ ID NO: 5526 - protein, 374 aa, Homo Sapiens
MGLPRGSFFWVLLLLTAACSGLLFALYFSAVQRYPGPAAGARDTTSFEAFFQSKASNSWTGKGQACRHLLHLAIQRHPHFRGLFNLSIPVLLWGDLFTPALWDRLSQHKAPYGWRGLSHQVIASTLSLLNGSESAKLFAPPRDTPPKCIRCAVVGNGGILNGSRQGPNIDAHDYVFRLNGAVIKGFERDVGTKTSFYGFTVNTMKNSLVSYWNLGFTSVPQGQDLQYIFIPSDIRDYVMLRSAILGVPVPEGLDKGDRPHAYFGPEASASKFKLLHPDFISYLTERFLKSKLINTHFGDLYMPSTGALMLLTALHTCDQVSAYGFITSNYWKFSDHYFERKMKPLIFYANHDLSLEAALWRDLHKAGILQLYQR

SEQ ID NO: 5527 - protein, 128 aa, Homo Sapiens [sequence omitted]

SEQ ID NO: 5528 - protein, 782 aa, Homo Sapiens
MAPSAWAICWLLGGLLLHGGSSGPSPGPSVPRLRLSYRDLLSANRSAIFLGPQGSLNLQAMYLDEYRDRLFLGGLDALYSLRLDQAWPDPREVLWPPQPGQREECVRKGRDPLTECANFVRVLQPHNRTHLLACGTGAFQPTCALITVGHRGEHVLHLEPGSVESGRGRCPHEPSRPFASTFIDGELYTGLTADFLGREAMIFRSGGPRPALRSDSDQSLLHDPRFVMAARIPENSDQDNDKVYFFFSETVPSPDGGSNHVTVSRVGRVCVNDAGGQRVLVNKWSTFLKARLVCSVPGPGGAETHFDQLEDVFLLWPKAGKSLEVYALFSTVSAVFQGFAVCVYHMADIWEVFNGPFAHRDGPQHQWGPYGGKVPFPRPGVCPSKMTAQPGRPFGSTKDYPDEVLQFARAHPLMFWPVRPRHGRPVLVKTHLAQQLHQIVVDRVEAEDGTYDVIFLGTDSGSVLKVIALQAGGSAEPEEVVLEELQVFKVPTPITEMEISVKRQMLYVGSRLGVAQLRLHQCETYGTACAECCLARDPYCAWDGASCTHYRPSLGKRRFRRQDIRHGNPALQCLGQSQEEEAVGLVAATMVYGTEHNSTFLECLPKSPQAAVRWLLQRPGDEGPDQVKTDERVLHTERGLLFRRLSRFDAGTYTCTTLEHGFSQTVVRLALVVIVASQLDNLFPPEPKPEEPPARGGLASTPPKAWYKDILQLIGFANLPRVDEYCERVWCRGTTECSGCFRSRSRGKQARGKSWAGLELGKKMKSRVHAEHNRTPREVEAT

SEQ ID NO: 5529 - protein, 725 aa, Homo Sapiens
MAAASAVSVLLVAAERNRWHRLPSLLLPPRTWVWRQRTMKYTTATGRNITKVLIANRGEIACRVMRTAKKLGVQTVAVYSEADRNSMHVDMADEAYSIGPAPSQQSYLSMEKIIQVAKTSAAQAIHPGCGFLSENMEFAELCKQEGIIFIGPPPSAIRDMGIKSTSKSIMAAAGVPVVEGYHGEDQSDQCLKEHARRIGYPVMIKAVRGGGGKGMRIVRSEQEFQEQLESARREAKKSFNDDAMLIEKFVDTPRHVEVQVFGDHHGNAVYLFERDCSVQRRHQKIIEEAPAPGIKSEVRKKLGEAAVRAAKAVNYVGAGTVEFIMDSKHNFCFMEMNTRLQVEHPVTEMITGTDLVEWQLRIAAGEKIPLSQEEITLQGHAFEARIYAEDPSNNFMPVAGPLVHLSTPRADPSTRIETGVRQGDEVSVHYDPMIAKLVVWAADRQAALTKLRYSLRQYNIVGLHTNIDFLLNLSGHPEFEAGNVHTDFIPQHHKQLLLSRKAAAKESLCQAALGLILKEKAMTDTFTLQAHDQFSPFSSSSGRRLNISYTRNMTLKDGKNNVAIAVTYNHDGSYSMQIEDKTFQVLGNLYSEGDCTYLKCSVNGVASKAKLIILENTIYLFSKEGSIEIDIPVPKYLSSVSSQETQGGPLAPMTGTIEKVFVKAGDKVKAGDSLMVMIAMKMEHTIKSPKDGTVKKVFYREGAQANRHTPLVEFEEEESDKRESE

SEQ ID NO: 5530 - protein, 452 aa, Homo Sapiens
MNSGILQVFQGELICPLCMNYFIDPVTIDCGHSFCRPCFYLNWQDIPFLVQCSECTKSTEQINLKTNIHLKKMASLARKVSLWLFLSSEEQMCGTHRETKKIFCEVDRSLLCLLCSSSQEHRYHRHRPIEWAAEEHREKLLQKMQSLWEKACENHRNLNVETTRTRCWKDYVNLRLEAIRAEYQKMPAFHHEEEKHNLEMLKKKGKEIFHRLHLSKAKMAHRMEILRGMYEELNEMCHKPDVELLQAFGDILHRSESVLLHMPQPLNPELSAGPITGLRDRLNQFRVHITLHHEEANNDIFLYEILRSMCIGCDHQDVPYFTATPRSFLAWGVQTFTSGKYYWEVHVGDSWNWAFGVCNMYRKEKNQNEKIDGKAGLFLLGCVKNDIQCSLFTTSPLMLQYIPKPTSRVGLFLDCEAKTVSFVDVNQSSLIYTIPNCSFSPPLRPIFCCIHF

SEQ ID NO: 5531 - protein, 585 aa, Homo Sapiens [sequence omitted]

SEQ ID NO: 5532 - protein, 1166 aa, Homo Sapiens
DPVMFMVAFYGCLLAEVIPVPIEVPLTRKDAGGQQIGFLLGSCGIALALTSEVCLKGLPKTQNGEIVQFKGWPRLKWVVTDSKYLSKPPKDWQPHISPAGTEPAYIEYKTSKEGSVMGVTVSRLAMLSHCQALSQACNYSEGETIVNVLDFKKDAGLWHGMFANVMNKMHTISVPYSVMKTCPLSWVQRVHAHKAKVALVKCRDLHWAMMAHRDQRDVSLSSLRMLIVTDGANPWSVSSCDAFLSLFQSHGLKPEAICPCATSAEAMTVAIRRPGVPGAPLPGRAILSMNGLSYGVIRVNTEDKNSALTVQDVGHVMPGGMMCIVKPDGPPQLCKTDEIGEICVSSRTGGMMYFGLAGVTKNTFEVIPVNSAGSPVGDVPFIRSGLLGFVGPGSLVFVVGKMDGLLMVSGRRHNADDIVATGLAVESIKTVYRGRIAVFSVSVFYDERIVVVAEQRPDASEEDSFQWMSRVLQAIDSIHQVGVYCLALVPANTLPKTPLGGIHISQTKQLFLEGSLHPCNILMCPHTCVTNLPKPRQKQPGVGPASVMVGNLVAGKRIAQAAGRDLGQIEENDLVRKHQFLAEILQWRAQATPDHVLFMLLNAKGTTVCTASCLQLHKRAERIASVLGDKGHLNAGDNVVLLYPPGIELIAAFYGCLYAGCIPVTVRPPHAQNLTATLPTVRMIVDVSKAACILTSQTLMRLLRSREAAAAVDVKTWPTIIDTDDLPRKRLPQLYKPPTPEMLAYLDFSVSTTGMLTGVKMSHSAVNALCRAIKLQCELYSSRQIAICLDPYCGLGFALWCLCSVYSGHQSVLIPPMELENNLFLWLSTVNQYKIRDTFCSYSVMELCTKGLGNQVEVLKTRGINLSCVRTCVVVAEERPRVALQQSFSKLFKDIGLSPRAVSTTFGSRVNVAICLQGTSGPDPTTVYVDLKSLRHDRVRLVERGAPQSLLLSESGKILPGVKVVIVNPETKGPVGDSHLGEIWVNSPHTASGYYTIYDSETLQADHFNTRLSFGDAAQTLWARTGYLGFVRRTELTAATGERHDALYVVGALDETLELRGLRYHPIDIETSVSRIHRSIAECAVFTWTNLLVVVVELCGSEQEALDLVPLVTNVVLEEHYLIVGVVVVVDPGVIPINSRGEKQRMHLRDSFLADQLDPIYVAYNM

SEQ ID NO: 5533 - protein, 985 aa, Homo Sapiens
FLLKNNYKLTSITFSDENDDQDFELWDDVGLNIPKPPDLLQLYRDFGNHQVTGKDLVDVASGVEEDELEALTPIISNLPPTLETPQPAENSMLVQKLEDKISLLNSEKWSLMEQIRRLKSEMDFLKNEHFAIPAVCDSVQPPLDQLPHKDSEDSGQHPDVNSSDKGKNTDIHLSISDEADSTIPKENSPNSFPRREREGMPPSSLSSKKTVHFDKPNRKLSPAFHQALLSFCRMSADSRLGYEVSRIADSEKSVMLMLGRCLPHIVPNVLLAKREELIPLILCTACLHPEPKERDQLLHILFNLIKRPDDEQRQMILTGCVAFARHVGPTRVEAELLPQCWEQINHKYPERRLLVAESCGALAPYLPKEIRSSLVLSMLQQMLMEDKADLVREAVIKSLGIIMGYIDDPDKYHQGFELLLSALGDPSERVVSATHQVFLPAYAAWTTELGNLQSHLILTLLNKIEKLLREGEHGLDEHKLHMYLSALQSLIPSLFALVLQNAPFSSKAKLHGEVPQIEVTRFPRPMSPLQDVSTIIGSREQLAVLLQLYDYQLEQEGTTGWESLLWVVNQLLPQLIEIVGKINVTSTACVHEFSRFFWRLCRTFGKIFTNTKVKPQFQEILRLSEENIDSSAGNGVLTKATVPIYATGVLTCYIQIKEYLHIHNEISWEWDPSLNTKCVSYTHYTHSLKEEDRKLLVGFLEDVMTLLSLSHAPLDSLKASFVELGANPAYHELLLTVLWYGVVHTSALVRCTAARMFELLVKGVNETLVAQRVVPALITLSSDPEISVRIATIPAFGTIMETVIQRELLERVKMQLASFLEDPQYQDQHSLHTEIIKTFGRVGPNAEPRFRDEFVIPHLHKLALVNNLQIVDSKRLDIATHLFEAYSALSCCFISEDLMVNHFLPGLRCLRTDMEHLSPEHEVILSSMIKECEQKVENKTVQEPQGSMSIAASLVSEDTKTKFLNKMGQLTTSGAMLANVFQRKK

SEQ ID NO: 5534 - protein, 109 aa, Homo Sapiens
MNPALGNQTDVAGLFLANSSEALERAVRCCTQASVVTDDGFAEGGPDERSLYIMRVVQIAVMCVLSLTVVFGIFFLGCNLLIKSEGMINFLVKDRRPSKEVEAVVVGPY

SEQ ID NO: 5535 - protein, 293 aa, Homo Sapiens [sequence omitted]

SEQ ID NO: 5536 - protein, 430 aa, Homo Sapiens [sequence omitted]

SEQ ID NO: 5537 - protein, 396 aa, Homo Sapiens
MPPKKGGDGIKPPPIIGRFGTSLKIGIVGLPNVGKSTFFNVLTNSQASAENFPFCTIDPNESRVPVPDERFDFLCQYHKPASKIPAFLNVVDIAGLVKGAHNGQGLGNAFLSHISACDGIFHLTRAFEDDDITHVEGSVDPIRDIEIIHEELQLKDEEMIGPIIDKLEKVAVRGGDKKLKPEYDIMCKVKSWVIDQKKPVRFYHDWNDKEIEVLNKHLFLTSKPMVYLVNLSEKDYIRKKNKWLIKIKEWVDKYDPGALVIPFSGALELKLQELSAEERQKYLEANMTQSALPKIIKAGFAALQLEYFFTAGPDEVRAWTIRKGTKAPQAAGKIHTDFEKGFIMAEVMKYEDFKEEGSENAVKAAGKYRQQGRNYIVEDGDIIFFKFNTPQQPKKK

SEQ ID NO: 5538 - protein, 269 aa, Homo Sapiens
MGQNDLMGTAEDFADQFLRVTKQYLPHVARLCLISTFLEDGIRMWFQWSEQRDYIDTTWNCGYLLASSFVFLNLLGQLTGCVLVLSRNFVQYACFGLFGIIALQTIAYSILWDLKFLMRNLALGGGLLLLLAESRSEGKSMFAGVPTMRESSPKQYMQLGGRVLLVLMFMTLLHFDASFFSIVQNIVGTALMILVAIGFKTKLAALTLVVWLFAINVYFNAFWTIPVYKPMHDFLKYDFFQTMSVIGGLLLVVALGPGGVSMDEKKKEW

SEQ ID NO: 5539 - protein, 115 aa, Homo Sapiens
MRPVAQLLGLLLLWFPGSRCDIQMTQSPSSVSASVGDRVTVTCRASQGISSWLAWYQQKPGKAPKLLIHAASSLQSGVPSRFIGSGSGTDFTLTITSLQAEDFATYYCQQADSLP

SEQ ID NO: 5540 - protein, 274 aa, Homo Sapiens
MGKSLSHLPLHSSKEDAYDGVTSENMRNGLVNSEVHNEDGRNGDVSQFPYVEFTGRDSVTCPTCQGTGRIPRGQENQLVALIPYSDQRLRPRRTKLYVMASVFVCLLLSGLAVFFLFPRSIDVKYIGVKSAYVSYDVQKRTIYLNITNTLNITNNNYYSVEVENITAQVQFSKTVIGKARLNNISIIGPLDMKQIDYTVPTVIAEEMSYMYDFCTLISIKVHNIVLMMQVTVTTTYFGHSEQISQERYQYVDCGRNTTYQLGQSEYLNVLQPQQ

SEQ ID NO: 5541 - protein, 421 aa, Homo Sapiens
MRWILFIGALIGSSICGREKFFGDQVLRINVRNGDEISKLSQLVNSNNLKLNFWKSPSSFNRPVDVLVPSVSLQAFKSFLRSQGLEYAVTIEDLQALLDNEDDEMQHNEGQERSSNNFNYGAYHSLEAIYHEMDNIAADFPDLARRVKIGHSFENRPMYVLKFSTGKGVRRPAVWLNAGIHSREWISQATAIWTARKIVSDYQRDPAITSILEKMDIFLLPVANPDGYVYTQTQNRLWRKTRSRNPGSSCIGADPNRNWNASFAGKGASDNPCSEVYHGPHANSEVEVKSVVDFIQKHGNFKGFIDLHSYSQLLMYPYGYSVKKAPDAEELDKVARLAAKALASVSGTEYQVGPTCTTVYPASGSSIDWAYDNGIKFAFTFELRDTGTYGFLLPANQIIPTAEETWLGLKTIMEHVRDNLY

SEQ ID NO: 5542 - protein, 391 aa, Homo Sapiens
LPKPRLGPGQPEKDRTESSVRMAITLEEAPWLGWLLVKALMRFAFMVVNNLVAIPSYICYVIILQPLRVLDSKRFWYIEGIMYKWLLGMVASWGWYAGYTVMEWGEDIKAVSKDEAVMLVNHQATGDVCTLMMCLQDKGLVVAQMMWLMDHIFKYTNFGIVSLVHGDFFIRQGRSYRDQQLLLLKKHLENNYRSRDRKWIVLFPEGGFLRKRRETSQAFAKKNNLPFLTNVTLPRSGATKIILNALVAQQKNGSPAGGDAKELDSKSKGLQWIIDTTIAYPKAEPIDIQTWILGYRKPTVTHVHYRIFPIKDVPLETDDLTTWLYQRFVEKEDLLSHFYETGAFPPSKGHKEAVSREMTLSNLWIFLIQSFAFLSGYMWYNIIQYFYHCLF

SEQ ID NO: 5543 - protein, 448 aa, Homo Sapiens [sequence omitted]

SEQ ID NO: 5544 - protein, 465 aa, Homo Sapiens
MTGRAMDPLPAAAVGAAAEAEADEEADPPASDLPTPQAIEPQAIVQQVPAPSRMQMPQGNPLLLSHTLQELLARDTVQVELIPEKKGLFLKHVEYEVSSQRFKSSVYRRYNDFVVFQEMLLHKFPYRMVPALPPKRMLGADREFIEARRRALKRFVNLVARHPLFSEDVVLKLFLSFSGSDVQNKLKESAQCVGDEFLNCKLATRAKDFLPADIQAQFAISRELIRNIYNSFHKLRDRAERIASRAIDNAADLLIFGKELSAIGSDTTPLPSWAALNSSTWGSLKQALKGLSVEFALLADKAAQQGKQEENDVVEKLNLFLDLLQSYKDLCERHEKGVLHKHQRALHKYSLMKRQMMSATAQNREPESVEQLESRIVEQENAIQTMELRNYFSLYCLHQETQLIHVYLPLTSHILRAFVNSQIQGHKEMSKVWNDLRPKLSCLFAGPHSTLTPPCSPPEDGLCPH

SEQ ID NO: 5545 - protein, 334 aa, Homo Sapiens
PPSNKTTCENWREIHHLVFHVANICFAVGLVIPTTLHLHMIFLRGMLTLGCTLYIVWATLYRCALDIMIWNSVFLGVNILHLSYLLYKKRPVKIEKELSGMYRRLFEPLRVPPDLFRRLTGQFCMIQTLKKGQTYAAEDKTSVDDRLSILLKGKMKVSYRGHFLHNIYPCAFIDSPEFRSTQMHKGEKFQVTIIADDNCRFLCWSRERLTYFLESEPFLYEIFRYLIGKDITNKLYSLNDPTLNDKKAKKLEHQLSLCTQISMLEMRNSIASSSDSDDGLHQFLRGTSSMSSLHVSSPHQRASAKMKPIEEGAEDDDDVFEPASPNTLKVHQLP

SEQ ID NO: 5546 - protein, 545 aa, Homo Sapiens
MGQVLPVFAHCKEAPSTASSTPDSTEGGNDDSDFRELHTAREFSEEDEEETTSQDWGTPRELTFSYIAFDGVVGSGGRRDSTARRPRPQGRSVSEPRDQHPQPSLGDSLESIPSLSQSPEPGRRGDPDTAPPSERPLEDLRLRLDHLGWVARGTGSGEDSSTSSSTPLEDEEPQEPNRLETGEAGEELDLRLRLAQPSSPEVLTPQLSPGSGTPQAGTPSPSRSRDSNSGPEEPLLEEEEKQWGPLEREPVRGQCLDSTDQLEFTVEPRLLGTAMEWLKTSLLLAVYKTVPILELSPPLWTAIGWVQRGPTPPTPVLRVLLKWAKSPRSSGVPSLSLGADMGSKVADLLYWKDTRTSGVVFTGLMVSLLCLLHFSIVSVAAHLALLLLCGTISLRVYRKVLQAVHRGDGANPFQAYLDVDLTLTREQTERLSHQITSRVVSAATQLRHFFLVEDLVDSLKLALLFYILTFVGAIFNGLTLLILGVIGLFTIPLLYRQHQAQIDQYVGLVTNQLSHIKAKIRAKIPGTGALASAAAAVSGSKAKAE

SEQ ID NO: 5547 - protein, 579 aa, Homo Sapiens
  misc_feature (578)..(578): Xaa can be any naturally occurring amino acid
AERVVIFSKSYCPHSTRVKELFSSLGVECNVLELDQVDDGARVQEVLSEITNQKTVPNIFVNKVHVGGCDQTFQAYQSGLLQKLLQEDLAYDYDLIIIGGGSGGLSCAKEAAILGKKVMVLDFVVPSPQGTSWGLGGTCVNVGCIPKKLMHQAALLGQALCDSRKFGWEYNQQVRHNWETMTKAIQNHISSLNWGYRLSLREKAVAYVNSYGEFVEHHKIKATNKKGQETYYTAAQFVIATGERPRYLGIQGDKEYCITSDDLFSLPYCPGKTLVVGASYVALECAGFLAGFGLDVTVMVRSILLRGFDQEMAEKVGSYMEQHGVKFLRKFIPVMVQQLEKGSPGKLKVLAKSTEGTETIEGVYNTVLLAIGRDSCTRKIGLEKIGVKINEKSGKIPVNDVEQTNVPYVYAVGDILEDKPELTPVAIQSGKLLAQRLFGASLEKCDYINVPTTVFTPLEYGCCGLSEEKAIEVYKKENLEIYHTLFWPLEWTVAGRENNTCYAKIICNKFDHDRVIGFHILGPNAGEVTQGFAAAMKCGLTKQLLDDTIGIHPTCGEVFTTLEITKSSGLDITQKGCXG

SEQ ID NO: 5548 - protein, 165 aa, Homo Sapiens
MVNPGSSSQPPPVTAGSLSWKRCAGCGGKIADRFLLYAMDSYWHSRCLKCSCCQAQLGDIGTSCYTKSGMILCRNDYIRLFGNSGACSACGQSIPASELVMRAQGNVYHLKCFTCSTCRNRLVPGDRFHYINGSLFCEHDRPTALINGHLNSLQSNPLLPDQKVC

SEQ ID NO: 5549 - protein, 211 aa, Homo Sapiens
MKIWTSEHVFDHPWETVTTAAMQKYPNPMNPSVVGVDVLDRHIDPSGKLHSHRLLSTEWGLPSIVKSLIGAARTKTYVQEHSVVDPVEKTMELKSTNISFTNMVSVDERLIYKPHPQDPEKTVLTQEAIITVKGVSLSSYLEGLMASTISSNASKGREAMEWVIHKLNAEIEELTASARGTIRTPMAAAAFCREVIVTVGRQHRVLQVSPN

SEQ ID NO: 5550 - protein, 302 aa, Homo Sapiens [sequence omitted]

SEQ ID NO: 5551 - protein, 58 aa, Homo Sapiens
MQMFPPSPLFFFLQLLKQSSRRLEHTFVFLRNFSLMLLRYIGKKRRATRFWDPRRGTP

SEQ ID NO: 5552 - protein, 372 aa, Homo Sapiens
MSGRSGKKKMSKLSRSARAGVIFPVGRLMRYLKKGTFKYRISVGAPVYMAAVIEYLAAEILELAGNAARDNKKARIAPRHILLAVANDEELNQLLKGVTIASGGVLPRIHPELLAKKRGTKGKSETILSPPPEKRGRKATSGKKGGKKSKAAKPRTSKKSKPKDSDKEGTSNSTSEDGPGDGFTILSSKSLVLGQKLSLTQSDISHIGSMRVEGIVHPTTAEIDLKEDIGKALEKAGGKEFLETVKELRKSQGPLEVAEAAVSQSSGLAAKFVIHCHIPQWGSDKCEEQLEETIKNCLSAAEDKKLKSVAFPPFPSGRNCFPKQTAAQVTLKAISAHFDDSSASSLKNVYFLLFDSESIGIYVQEMAKLDAK

SEQ ID NO: 5553 - protein, 139 aa, Homo Sapiens [sequence omitted]

SEQ ID NO: 5554 - protein, 241 aa, Homo Sapiens
MATRGLCCPGLAGLAAPRARLEKRVPAAGSASLNLAGPDVAGGALGALLFPLPTPVSLLTCRPRSRPSSDSCSVPMTGARGQGLEVVRSPSPPLPLSCSNSTRSLLSPLGHQSFQFDEDDGDGEDEEDVDDEEDVDEDAHDSEAKVASLRGMELQGCASTQVESENNQEEQKQVRLPESRLTPWEVWFIGKEKEERDRLQLKALEELNQQLEKRKEMEEREKRKIIAEEKHKEWVQKKNEQ

SEQ ID NO: 5555 - protein, 363 aa, Homo Sapiens
MASKSWLNFLTFLCGSAIGFLLCSQLFSILLGEKVDTQPNVLHNDPHARHSDDNGQNHLEGQMNFNADSSQHKDENTDIAENLYQKVRILCWVMTGPQNLEKKAKHVKATWAQRCNKVLFMSSEENKDFPAVGLKTKEGRDQLYWKTIKAFQYVHEHYLEDADWFLKADDDTYVILDNLRWLLSKYDPEEPIYFGRRFKPYVKQGYMSGGAGYVLSKEALKRFVDAFKTDKCTHSSSIEDLALGRCMEIMNVEAGDSRDTIGKETFHPFVPEHHLIKGYLPRTFWYWNYNYYPPVEGPGCCSDLAVSFHYVDSTTMYELEYLVYHLRPYGYLYRYQPTLPERILKEISQANKNEDTKVKLGNP

SEQ ID NO: 5556 - protein, 574 aa, Homo Sapiens
MLSAPCCDDRRMCVCPGPRRIGIPVRSSSLPLFSDAMPAPTQLFFPLIRNCELSRIYGTACYCHHKHLCCSSSYIPQSRLRYTPHPAYATFCRPKENWWQYTQGRRYASTPQKFYLTPPQVNSILKANEYSFKVPEFDGKMSVLSLDLTAIKLPANAPIEDRRSAATCLQTRGMLLGVFDGHAGCAWSQAVSERLFYYIAGSLVPHETLLEIENAVESGRALLPILQWHKHPNDYFSKEASKLYFNSLRTYWQELIDLNTGESTDIDVKEALINAFKRLDNDISLEAQVGDPNSFLNYLVLRVAFSGATACVAHVDGVDLHVANTGDSRAMLGVQEEDGSWSAVTLSNDHNAQNERELERLKLEHPKSEAKSVVKQDRLLGLLMPFRAFGDVKFKWSIDLQKRVIESGPDQLNDNEYTKFIPPNYHTPPYLTAEPEVTYHRLRPQDKFLVLATDGLWETMHRQDVVRIVGEYLTGMHHQQPIAVGGYKVTLGQMHGLLTERRTKMSSVFEDQNAATHLIRHAVGNNEFGTVDHERLSKMLSLPEELARMYRDDITIIVVQFNSHVVGAYQNQEK

SEQ ID NO: 5557 - protein, 376 aa, Homo Sapiens
MGLLAFLKTQFVLHLLVGFVFVVSGLVINFVQLCTLALWPVSKQLYRRLNCRLAYSLWSQLVMLLEWWSCTECTLFTDQATVERFGKEHAVIILNHNFEIDFLCGWTMCERFGVLGSSKVLAKKELLYVPLIGWTWYFLEIVFCKRKWEEDRDTVVEGLRRLSDYPEYMWFLLYCEGTRFTETKHRVSMEVAAAKGLPVLKYHLLPRTKGFTTAVKCLRGTVAAVYDVTLNFRGNKNPSLLGILYGKKYEADMCVRRFPLEDIPLDEKEAAQWLHKLYQEKDALQEIYNQKGMFPGEQFKPARRPWTLLNFLSWATILLSPLFSFVLGVFASGSPLLILTFLGFVGAASFGVRRLIGVTEIEKGSSYGNQEFKKKE

SEQ ID NO: 5558 - protein, 117 aa, Homo Sapiens
GAHSDLVGASSDDWGIPASNMTKKKRENLGVALEIDGLEEKLSQCRRDLEAVNSRLHSRELSPEARRSLEKEKNSLMNKASNYEKELKFLRQENRKNMLLSVAIFILLTLVYAYWTM

SEQ ID NO: 5559 - protein, 147 aa, Homo Sapiens
WAQAQSASFALSHSLEPPQEGHSTLLGSWSLRGRASRECRRENFPVDVLCSPDAENPHQPRGRSLPNPQMACECMASASRTHLLFPCSGQTPAGPCVCAPCCSLQLPARVPAKTSTLGKSLRLNLNSQLPESDLCFFTSTEDVRAFP

SEQ ID NO: 5560 - protein, 556 aa, Homo Sapiens
SHFDLMKMTAGKRSPPIKPLLGMNPFQKNPKHASVLAESGINYDKPLPPIQVASLRAERIAKEKKALADQQKAQQPAVAQPPPPQPQPPPPPQQPPPPLPQPQAAGSQPPAGPPAVQPQPQPQPQTQPQPVQAPAKAQPAITTGGSAAVLAGTIKTSVTGTSMPTGAVSGNVIVNTIAGVPAATFQSINKRLASPVAPGALTTPGGSAPAQVVHTQPPPRAVGSPATATPDLVSMATTQGVRAVTSVTASAVVTTNLTPVQTPARSLVPQVSQATGVQLPGKTITPAHFQLLRQQQQQQQQQQQQQQQQQQQQQQQQQQQQQQTTTTSQVQVPQIQGQAQSPAQIKAVGKLTPEHLIKMQKQKLQMPPQPPPPQAQSAPPQPAAQVQVQTSQPPQQQSPQLTTVTAPRPGALLTGTTVANLQVARLTRVPTSQLQSQGQMQTQAPQPAQVPLPKPPVVSVPAAVVSSPGVTTLPMNVAGISVAIGQPQKAAGQTVVDPARAHAAAAEAEAAGRPAAEGHPAPGCTGPGSRPAEDHRTADHHPWRAAEGCLRRAAGP

SEQ ID NO: 5561 - protein, 403 aa, Homo Sapiens
MQRAVSVVARLGFRLQAFPPALCRPLSCAQEVLRRTPLYDFHLAHGGKMVAFAGWSLPVQYRDSHTDSHLHTRQHCSLFDVSHMLQTKILGSDRCKLMESLVVGDIAELRPNQGTLSLFTNEAGGILDDLIVTNTSEGHLYVVSNAGCWEKDLALMQDKVRELQNQGRDVGLEVLDNALLALQGPTAAQVLQAGVADDLRKLPFMTSAVMEVFGVSGCRVTRCGYTGEDGVEISVPVAGAVHLATAILKNPEVKLAGLAARDSLRLEAGLCLYGNDIDEHTTPVEGSLSWTLGKRRRAAMDFPGAKVIVPQLKGRVQRRRVGLMCEGAPMRAHSPILNMEGTKIGTVTSGCPSPSLKKNVAMGYVPCEYSRPGTMLLVEVRRKQQMAVVSKMPFVPTNYYTLK

SEQ ID NO: 5562 - protein, 104 aa, Homo Sapiens
AVSSGIVGILHVSVPYPAGNQLTDLLSGWLTLSSTGCRSDDMMLDTIIVHFVNLVWWCHTLSLYSINKAGIWPSAVGGVAPVTCTGISRRLSPKDMETDVCSIS

SEQ ID NO: 5563 - protein, 352 aa, Homo Sapiens
DAFRAFHQDLNFVRKFLQPLLIGELAPEEPSQDGPLNAQLVEDFRALHQAAEDMKLFDASPTFFAFLLGHILAMEVLAWLLIYLLGPGWVPSALAAFILAISQAQSWCLQHDLGHASIFKKSWWNHVAQKFVMGQLKGFSAHWWNFRHFQHHAKPNIFHKDPDVTVAPVFLLGESSVEYGKKKRRYLPYNQQHLYFFLIGPPLLTLVNFEVENLAYMLVCMQWADLLWAASFYARFFLSYLPFYGGPGKPLVRVDHTDEPHPQGDRPREAPGLGQLSAGSHLQRGALTFHQLVQRAPQLPDRAPPLPQDAETQLQPGGPAGQVAVCQARPQLRSEALPHRAGGHRQVPEEVW

SEQ ID NO: 5564 - protein, 136 aa, Homo Sapiens
MRTPGPLPVLLLLLAGAPAARPTPPTCYSRMRALSQEITRDFNLLQVSEPSEPCVRYLPRLYLDIHNYCVLDKLRDFVASPPCWKVAQVDSLKDKARKLYTIMNSFCRRDLVFLLDDCNALEYPIPVTTVLPDRQR

SEQ ID NO: 5565 - protein, 1576 aa, Homo Sapiens
LCNGVNDCGDNSDESPQQNCRPRTGEENCNVNNGGCAQKCQMVRGAVQCTCHTGYRLTEDGHTCQDVNECAEEGYCSQGCTNSEGAFQCWCETGYELRPDRRSCKALGPEPVLLFANRIDIRQVLPHRSEYTLLLNNLENAIALDFHHRRELVFWSDVTLDRILRANLNGSNVEEVVSTGLESPGGLAVDWVHDKLYWTDSGTSRIEVANLDGAHRKVLLWQNLEKPRAIALHPMEGTIYWTDWGNTPRIEASSMDGSGRRIIADTHLFWPNGLTIDYAGRRMYWVDAKHHVIERANLDGSHRKAVISQGLPHPFAITVFEDSLYWTDWHTKSINSANKFTGKNQEIIRNKLHFPMDIHTLHPQRQPAGKNRCGDNNGGCTHLCLPSGQNYTCACPTGFRKISSHACAQSLDKFLLFARRMDIRRISFDTEDLSDDVIPLADVRSAVALDWDSRDDHVYWTDVSTDTISRAKWDGTGQEVVVDTSLESPAGLAIDWVTNKLYWTDAGTDRIEVANTDGSMRTVLIWENLDRPRDIVVEPMGGYMYWTDWGASPKIERAGMDASGRQVIISSNLTWPNGLAIDYGSQRLYWADAGMKTIEFAGLDGSKRKVLIGSQLPHPFGLTLYGERIYWTDWQTKSIQSADRLTGLDRETLQENLENLMDIHVFHRRRPPVSTPCAMENGGCSHLCLRSPNPSGFSCTCPTGINLLSDGKTCSPGMNSFLIFARRIDIRMVSLDIPYFADVVVPINITMKNTIAVGVDPQEGKVYWSDSTLHRISRANLDGSQHEDIITTGLQTTDGLAVDAIGRKVYWTDTGTNRIEVGNLDGSMRKVLVWQNLDSPRAIVLYHEMGFMYWTDWGENAKLERSGMDGSDRAVLINNNLGWPNGLTVDKASSQLLWADAHTERIEAADLNGANRHTLVSPVQHPYGLTLLDSYIYWTDWQTRSIHRADKGTGSNVILVRSNLPGLMDMQAVDRAQPLGFNKCGSRNGGCSHLCLPRPSGFSCACPTGIQLKGDGKTCDPSPETYLLFSSRGSIRRISLDTSDHTDVHVPVPELNNVISLDYDSVDGKVYYTDVFLDVIRRADLNGSNMETVIGRGLKTTDGLAVDWVARNLYWTDTGRNTIEASRLDGSCRKVLINNSLDEPRAIAVFPRKGYLFWTDWGHIAKIERANLDGSERKVLINTDLGWPNGLTLDYDTRRIYWVDAHLDRIESADLNGKLRQVLVGHVSHPFALTQQDRWIYWTDWQTKSIQRVDKYSGRNKETVLANVEGLMDIIVVSPQRQTGTNACGVNNGGCTHLCFARASDFVCACPDEPDSQPCSLVPGLVPPAPRATGMSEKSPVLPNTPPTTLYSSTTRTRTSLEEVEGRCSERDARLGLCARSNDAVPAAPGEGLHISYAIGGLLSILLILVVIAALMLYRHKKSKFTDPGMGNLTYSNPSYRTSTQEVKIEAIPKPAMYNQLCYKKEGGPDHNYTKEKIKIVEGICLLSGDDAEWDDLKQLRSSRGGLLRDHVCMKTDTVSIQASSGSLDDTEMEQLLQEEQSECSSVHTAATPERRGSLPDTGWKHERKLSSESQV

SEQ ID NO: 5566 - protein, 230 aa, Homo Sapiens
MEPLRLLILLFVTELSGAHNTTVFQGVAGQSLQVSCPYDSMKHWGRRKAWCRQLGEKGPCQRVVSTHNLWLLSFLRRWNGSTAITDDTLGGTLTITLRNLQPHDAGLYQCQSLHGSEADTLRKVLVEVLADPLDHRDAGDLWFPGESESFEDAHVEHSISRSLLEGEIPFPPTSILLLLACIFLIKILAASALWAAAWHGQKPGTHPPSELDCGHDPGYQLQTLPGLRDT

SEQ ID NO: 5567 - protein, 204 aa, Homo Sapiens
MDETVAEFIKRTILKIPMNELTTILKAWDFLSENQLQTVNFRQRKESVVQHLIHLCEEKRASISDAALLDIIYMQFHQHQKVWDVFQMSKGPGEDVDLFDMKQFKNSFKKILQRALKNVTVSFRETEENAVWIRIAWGTQYTKPNQYKPTYVVYYSQTPYAFTSSSMLRRNTPLLGQELEATGKIYLRQEEIILDITEMKKACN

SEQ ID NO: 5568 - protein, 373 aa, Homo Sapiens
MSSTPHDPFYSSPFGPFYRRHTPYMVQPEYRIYEMNKRLQSRTEDSDNLWWDAFATEFFEDDATLTLSFCLEDGPKRYTIGRTLIPRYFSTVFEGGVTDLYYILKHSKESYHNSSITVDCDQCTMVTQHGKPMFTKVCTEGRLILEFTFDDLMRIKTWHFTIRQYRELVPRSILAMHAQDPQVLDQLSKNITRMGLTNFTLNYLRLCVILEPMQELMSRHKTYNLSPRDCLKTCLFQKWQRMVAPPAEPTRQPTTKRRKRKNSTSSTSNSSAGNNANSTGSKKKTTAANLSLSSQVPDVMVVGEPTLMGGEFGDEDERLITRLENTQYDAANGMDDEEDFNNSPALGNNSPWNSKPPATQETKSENPPPQASQ

SEQ ID NO: 5569 - protein, 619 aa, Homo Sapiens
EPVVAAEAVMSVQVVSAAAAAKVPEVELKDLSPSEAESQLGLSTAAVGAMAPPAGGGDPEAPAPAAERPPVPGPGSGPAAALSPAAGKVPQASAMKRSDPHHQHQRHRDGGEALVSPDGTVTEAPRTVKKIQFADQKQEFNKRPTKIGRRSLSRSISQSSTDSYSSAASYTDSSDDETSPRDKQQKNSKGSSDFCVKNIKQAEFGRREIEIAEQEMPALMALRKRAQGEKPLAGAKIVGCTHITAQTAVLMETLGALGAQCRWAACNIYSTLNEVAAALAESGFPVFAWKGESEDDFWWCIDRCVNVEGWQPNMILDDGGDLTHWIYKKYPNMFKKIKGIVEESVTGVHRLYQLSKAGKLCVPAMNVNDSVTKQKFDNLYCCRESILDGLKRTTDMMFGGKQVVVCGYGEVGKGCCAALKAMGSIVYVTEIDPICALQACMDGFRLVKLNEVIRQVDIVITCTGNKNVVTREHLDRMKNSCIVCNMGHSNTEIDVASLRTPELTWERVRSQVDHVIWPDGKRIVLLAEGRLLNLSCSTVPTFVLSITATTQALALIELYNAPEGRYKQDVYLLPKKMDEYVASLHLPTFDAHLTELTDEQAKYLGLNKNGPFKPNYYRY

SEQ ID NO: 5570 - protein, 1033 aa, Homo Sapiens
WWVAGACDRELPPDPGTMSQGPPTGESSEPEAKVLHTKRLYRAVVEAVHRLDLILCNKTAYQEVFKPENISLRNKLRELCVKLMFLHPVDYGRKAEELLWRKVYYEVIQLIKTNKKHIHSRSTLECAYRTHLVAGIGFYQHLLLYIQSHYQLELQCCIDWTHVTDPLIGCKKPVSASGKEMDWAQMACHRCLVYLGDLSRYQNELAGVDTELLAERFYYQALSVAPQIGMPFNQLGTLAGSKYYNVEAMYCYLRCIQSEVSFEGAYGNLKRLYDKAAKMYHQLKKCETRKLSPGKKRCKDIKRLLVNFMYLQSLLQPKSSSVDSELTSLCQSVLEDFNLCLFYLPSSPNLSLASEDEEEYESGYAFLPDLLIFQMVIICLMCVHSLERAGSKQYSAAIAFTLALFSHLVNHVNIRLQAELEEGENPVPAFQSDGTDEPESKEPVEKEEEPDPEPPPVTPQVGEGRKSRKFSRLSCLRRRRHPPKVGDDSDLSEGFESDSSHDSARASEGSDSGSDKSLEGGGTAFDAETDSEMNSQESRSDLEDMEEEEGTRSPTLEPPRGRSEAPDSLNGPLGPSEASIASNLQAMSTQMFQTKRCFRLAPTFSNLLLQPTTNPHTSASHRPCVNGDVDKPSEPASEEGSESEGSESSGRSCRNERSIQEKLQVLMAEGLLPAVKVFLDWLRTNPDLIIVCAQSSQSLWNRLSVLLNLLPAAGELQESGLALCPEVQDLLEGCELPDLPSSLLLPEDMALRNLPPLRAAHRRFNFDTDRPLLSTLEESVVRICCIRSFGHFIARLQGSILQFNPEVGIFVSIAQSEQESLLQQAQAQFRMAQEEARRNRLMRDMAQLRLQLEVSQLEGSLQQPKAQSAMSPYLVPDTQALCHHLPVIRQLATSGRFIVIIPRTVIDGLDLLKKEHPGARDGIRYLEAEFKKGNRYIRCQKEVGKSFERHKLKRQDADAWTLYKILDSCKQLTLAQGAGEEDPSGMVTIITGLPLDNPSVLSGPMQAALQAAAHASVDIKNVLDFYKQWKEIG

SEQ ID NO: 5571 - protein, 1101 aa, Homo Sapiens
  misc_feature (332)..(332): Xaa can be any naturally occurring amino acid
MVALLLEFGANVDASSESGLTPLGYAAAAGYLSIVVLLCKKRAKVDHLDKNGQCALVHAALRGHLEVVKFLIQCDWTMAGQQQGVFKKSHAIQQALIAAASMGYTEIVSYLLDLPEKDEEEVERAQINSFDSLWGETALTAAAGRGKLEVCRLLLEQGAAVAQPNRRGAVPLFSTVRQGHWQIVDLLLTHGADVNMADKQGRTPLMMAASEGHLGTVDFLLAQGASIALMDKEGLTALSWACLKGHLSVVRSLVDNGAATDHADKNGRTPLDLAAFYGDAEVVQFLVDHGAMIEHVDYSGMRPLDRAVGCPNTSVVVTLLKKRSQDRLSDVXSRPRGPATWAMAPSKPDIMIILLSKLMKEGDMFYKKGKVKEAAQRYQYALKKFPREGFGEDLKPFRELKVSLLLNLSRCRRKMNDFGMAEEFATKALELKPKSYEAYYARARAKRSSRQFAAALEDLNEAIKLCPNNREIQRLLLRVEEECRQMQQPQQPPPPPQPQQQLPEEAEPEPQHEDIYSVQDIFEEEYLEQDVENVSIGLQTEARPSQGLPVIQSPPSSPPHRDSAYISSSPLGSHQVFDFRSSSSVGSPTRQTYQSTSPALSPTHQNSHYRPSPPHTSPAHQGGSYRFSPPPVGGQGKEYPSPPPSPLRRGPQYRASPPAESMSVYRSQSGSPVRYQQETSVSQLPGRPKSPLSKMAQRPYQMPQLPVAVPQQGLRLQPAKAQIVRSNQPSPAVHSSTVIPTGAYGQVAHSMASKYQSSQGDIGVSQSRLVYQGSIGGIVGDGRPVQHVQASLSAGAICQHGGLTKEDLPQRPSSAYRGGVRYSQTPQIGRSQSASYYPVCHSKLDLERSSSQLGSPDVSHLIRRPISVNPNEIKPHPPTPRPLLHSQSVGLRFSPSSNSISSTSNLTPTFRPSSSIQQMEIPLKPAYERSCDELSPVSPTQGGYPSEPTRSRTTPFMGIIDKTARTQQYPHLHQQNRTWAVSSVDTVLSPTSPGNLPQPESFSPPSSISNIAFYNKTNNAQNGHLLEDDYYSPHGMLANGSRGDLLERVSQASSYPDVKVARTLPVAQAYQDNLYRQLSRDSRQGQTSPIKPKRPFVESNV

SEQ ID NO: 5572 - protein, 390 aa, Homo Sapiens
MNGTRNWCTLVDVHPEDQAAGSVDILRLTLQGELTGDELEHIAQKAGRKTYAMVSSHSAGHSLASELVESHDGHEEIIKVYLKGRSGDKMIHEKNINQLKSEVQYIQEARNCLQKLREDISSKLDRNLGDSLHRQEIQVVLEKPNGFSQSPTALYSSPPEVDTCINEDVESLRKTVQDLLAKLQEAKRQHQSDCVAFEVTLSRYQREAEQSNVALQREEDRVEQKEAEVGELQRRLLGMETEHQALLAKVREGEVALEELRSNNADCQAEREKAATLEKEVAGLREKIHHLDDMLKSQQRKVRQMIEQLQNSKAVIQSKDATIQELKEKIAYLEAENLEMHDRMEHLIEKQISHGNFSTQARAKTENPGSIRISKPPSPKPMPVIRVVET

SEQ ID NO: 5573 - protein, 604 aa, Homo Sapiens
MARISFSYLCPASWYFTVPTVSPFLRQRVAFLGLFFISCLLLLMLIIDFRHWSASLPRDRQYERYLARVGELEATDTEDPNLNYGLVVDCGSSGSRIFVYFWPRHNGNPHDLLDIKQMRDRNSQPVVKKIKPGISAMADTPEHASDYLRPLLSFAAAHVPVKKHKETPLYILCTAGMRLLPERKQLAILADLVKDLPLEFDFLFSQSQAEVISGKQEGVYAWIGINFVLGRFDHEDESDAEATQELAAGRRRTVGILDMGGASLQIAYEVPTSTSVLPAKQEEAAKILLAEFNLGCDVQHTEHVYRVYVTTFLGFGGNFARQRYEDLVLNETLNKNRLLGQKTGLSPDNPFLDPCLPVGLTDVVERNSQVLHVRGRGDWVSCGAMLSPLLARSNTSQASLNGIYQSPIDFNNSEFYGFSEFFYCTEDVLRIGGRYHGPTFAKAAQDYCGMAWSVLTQRFKNGLFSSHADEHRLKYQCFKSAWMYQVLHEGFHFPYDYPNLRTAQLVYDREVQWTLGAILYKTRFLPLRDLRQEGVRQAHGSWFRLSFVYNHYLFFACILVVLLAIFLYLLRLRRIHHRQTRASAPLDLLWLEEVVPMMGVQVGP

SEQ ID NO: 5574 - protein, 1086 aa, Homo Sapiens
STERLDNKPETTRYDSFGRLTNVTFPTGQVSSFRSDTDSSVHVQVETSSKDDVTITTNLSASGAFYTLLQDQVRNSYYIGADGSLRLLLANGMEVALQTEPHLLAGTVNPTVGKRNVTLPIDNGLNLVEWRQRKEQARGQVTVFGRRLRVHNRNLLSLDFDRVTRTEKIYDDHRKFTLRILYDQAGRPSLWSPSSRLNGVNVTYSPGGYIAGIQRGIMSERMEYDQAGRITSRIFADGKTWSYTYLEKSMVLLLHSQRQYIFEFDKNDRLSSVTMPNVARQTLETIRSVGYYRNIYQPPEGNASVIQDFTEDGHLLHTFYLGTGRRVIYKYGKLSKLAETLYDTTKVSFTYDETAGMLKTINLQNEGFTCTIRYRQIGPLIDRQIFRFTEEGMVNARFDYNYDNSFRVTSMQAVINETPLPIDLYRYDDVSGKTEQFGKFGVIYYDINQIITTAVMTHTKHFDAYGRMKEVQYEIFRSLMYWMTVQYDNMGRVVKKELKVGPYANTTRYSYEYDADGQLQTVSINDKPLWRYSYDLNGNLHLLSPGNSARLTPLRYDIRDRITRLGDVQYKMDEDGFLRQRGGDIFEYNSAGLLIKAYNRAGSWSVRYRYDGLGRRVSSKSSHSHHLQFFYADLTNPTKVTHLYNHSSSEITSLYYDLQGHLFAMELSSGDEFYIACDNIGTPLAVFSGTGLMIKQILYTAYGEIYMDTNPNFQIIIGYHGGLYDPLTKLVHMGRRDYDVLAGRWTSPDHELWKHLSSSNVMPFNLYMFKNNNPISNSQDIKCFMTDVNSWLLTFGFQLHNVIPGYPKPDMDAMEPSYELIHTQMKTQEWDNSKSILGVQCEVQKQLKAFVTLERFDQLYGSTITSCQQAPKTKKFASSGSVFGKGVKFALKDGRVTTDIISVANEDGRRVAAILNHAHYLENLHFTIDGVDTHYFVKPGPSEGDLAILGLSGGRRTLENGVNVTVSQINTVLNGRTRRYTDIQLQYGALCLNTRYGTTLDEEKARVLELARQRAVRQAWAREQQRLREGEEGLRAWTEGEKQQVLSTGRVQGYDGFFVISVEQYPELSDSANNIHFMRQSEMGRR

SEQ ID NO: 5575 - protein, 1327 aa, Homo Sapiens
MEAPLQTGMVLGVMIGAGVAVVVTAVLILLVVRRLRVPKTPAPDGPRYRFRKRDKVLFYGRKIMRKVSQSTSSLVDTSVSATSRPRMRKKLKMLNIAKKILRIQKETPTLQRKEPPPAVLEADLTEGDLANSHLPSEVLYMLKNVRVLGHFEKPLFLELCRHMVFQRLGQGDYVFRPGQPDASIYVVQDGLLELCLPGPDGKECVVKEVVPGDSVNSLLSILDVITGHQHPQRTVSARAARDSTVLRLPVEAFSAVFTKYPESLVRVVQIIMVRLQRVTFLALHNYLGLTNELFSHEIQPLRLFPSPGLPTRTSPVRGSKRMVSTSATDEPRETPGRPPDPTGAPLPGPTGDPVKPTSLETPSAPLLSRCVSMPGDISGLQGGPRSDFDMAYERGRISVSLQEEASGGSLAAPARTPTQEPREQPAGACEYSYCEDESATGGCPFGPYQGRQTSSIFEAAKQELAKLMRIEDPSLLNSRVLLHHAKAGTIIARQGDQDVSLHFVLWGCLHVYQRMIDKAEDVCLFVAQPGELVGQLAVLTGEPLIFTLRAQRDCTFLRISKSDFYEIMRAQPSVVLSAAHTVAARMSPFVRQMDFAIDWTAVEAGRALYRQGDRSDCTYIVLNGRLRSVIQRGSGKKELVGEYGRGDLIGVVEALTRQPRATTVHAVRDTELAKLPEGTLGHIKRRYPQVVTRLIHLLSQKILGNLQQLQGPFPAGSGLGVPPHSELTNPASNLATVAILPVCAEVPMVAFTLELQHALQAIGPTLLLNSDIIRARLGASALDSIQEFRLSGWLAQQEDAHRIVLYQTDASLTPWTVRCLRQADCILIVGLGDQEPTLGQLEQMLENTAVRALKQLVLLHREEGAGPTRTVEWLNMRSWCSGHLHLRCPRRLFSRRSPAKLHELYEKVFSRRADRHSDFSRLARVLTGNTIALVLGGGGARGCSHIGVLKALEEAGVPVDLVGGTSIGSFIGALYAEERSASRTKQRAREWAKSMTSVLEPVLDLTYPVTSMFTGSAFNRSIHRVFQDKQIEDLWLPYFNVTTDITASAMRVHKDGSLWRYVRASMTLSGYLPPLCDPKDGHLLMDGGYINNLPADIARSMGAKTVIAIDVGSQDETDLSTYGDSLSGWWLLWKRLNPWADKVKVPDMAEIQSRLAYVSCVRQLEVVKSSSYCEYLRPPIDCFKTMDFGKFDQIYDVGYQYGKAVFGGWSRGNVIEKMLTDRRSTDLNESRRADVLAFPSSGFTDLAEIVSRIEPPTSYVSDGCADGEESDCLTEYEEDAGPDCSRDEGGSPEGASPSTASEMEEEKSILRQRRCLPQEPPGSATDA

SEQ ID NO: 5576 - protein, 1084 aa, Homo Sapiens
MFKDVPLTAEEVEFVVEKALSMFSKMNLQEIPPLVYQLLVLSSKGSRKSVLEGIIAFFSALDKQHNEEQSGDELLDVVTVPSGELRHVEGTIILHIVFAIKLDYELGRELVKHLKVGQQGDSNNNLSPFSIALLLSVTRIQRFQDQVLDLLKTSVVKSFKDLQLLQGSKFLQNLVPHRSYVSTMILEVVKNSVHSWDHVTQGLVELGFILMDSYGPKKVLDGKTIETSPSLSRMPNQHACKLGANILLETFKIHEMIRQEILEQVLNRVVTRASSPISHFLDLLSNIVMYAPLVLQSCSSKVTEAFDYLSFLPLQTVQRLLKAVQPLLKVSMSMRDCLILVLRKAMFANQLDARKSAVAGFLLLLKNFKVLGSLSSSQCSQSLSVSQVHVDVHSHYNSVANETFCLEIMDSLRRCLSQQADVRLTLYEGFYDVLRRNSQLANSVMQTLLSQLKQFYEPKPDLLPPLKLEACILTQGDKISLQEPLDYLLCCIQHCLAWYKNTVIPLQQGEEEEEEEEAFYEDLDDILESITNRMIKSELEDFELDKSADFSQSTSIGIKNNISAFLVMGVCEVLIEYNFSISSFSKNRFEDILSLFMCYKKLSDILNEKAGKAKTKMANKTSDSLLSMKFVSSLLTALFRVLLWRYTSIPTSVEESGKKEKGKSISLLCLEGLQKIFSAVQQFYQPKIQQFLRALDVTDKEGEEREDADVSVTQRTAFQIRQFQRSLLNLLSSQEEDFNSKEALLLVTVLTSLSKLLEPSSPQFVQMLSWTSKICKENSREDALFCKSLMNLLFSLHVSYKSPVILLRDLSQDIHGHLGDIDQDVEVEKTNHFAIVNLRTAAPTVCLLVLSQAEKVLEEVDWLITKLKGQVSQETLSEASSQATLPNQPVEKAIIMQLGTLLTFFHELVQTALPSGSCVDTLLKDLCKMYTTLTALVRYYLQVCQSSGGIPKNMEKLVKLSGSHLTPLCYSFISYVQNKSKSLNYTGEKKEKPAAVATAMARVLRETKPIPNLIFAIEQYEKFLIHLSKKSKVNLMQHMKLSTSRDFKIKGNILDMVLREDGEDENEEGTASEHGGQNKEPAKK

SEQ ID NO: 5577 - protein, 642 aa, Homo Sapiens
MGRRRAPAGGSLGRALMRHQTQRSRSHRHTDSWLHTSELNDGYDWGRLNLQSVTEQSSLDDFLATAELAGTEFVAEKLNIKFVPAEARTGLLSFEESQRIKKLHEENKQFLCIPRRPNWNQNTTPEELKQAEKDNFLEWRRQLVRLEEEQKLILTPFERNLDFWRQLWRVIERSDIVVQIVDARNPLLFRCEDLECYVKEMDANKENVILINKADLLTAEQRSAWAMYFEKEDVKVIFWSALAGAIPLNGDSEEEANRDDRQSNTTEFGHSSFDQAEISHSESEHLPARDSPSLSENPTTDEDDSEYEDCPEEEEDDWQTCSEEDGPKEEDCSQDWKESSTADSEARSRKTPQKRQIHNFSHLVSKQELLELFKELHTGRKVKDGQLTVGLVGYPNVGKSSTINTIMGNKKVSVSATPGHTKHFQTLYVEPGLCLCDCPGLVMPSFVSTKAEMTCSGILPIDQMRDHVPPVSLVCQNIPRHVLEATYGINIITPREDEDPHRPPTSEELLTAYGYMRGFMTAHGQPDQPRSARYILKDYVSGKLLYCHPPPGRDPVTFQHQHQRLLENKMNSDEIKMQLGRNKKAKQIENIVDKTFFHQENVRALTKGVQAVMGYKPGSGVVTASTASSENGAGKPWKKHGN

SEQ ID NO: 5578 - protein, 470 aa, Homo Sapiens
MEFAAENEGKSGGGLHSVAEGVRLSPEPGREGVRDLAGAEEFGGGEEGTGLTGIKEIGDGEEGSGQRPEEIPMDLTVVKQEIIDWPGTEGRLAGQWVEQEVEDRPEVKDENAGVLEVKQETDSSLVVKEAKVGEPEVKEEKVKEEVMDWSEVKEEKDNLEIKQEEKFVGQCIKEELMHGECVKEEKDFLKKEIVDDTKVKEEPPINHPVGCKRKLAMSRCETCGTEEAKYRCPRCMRYSCSLPCVKKHKAELTCNGVRDKTAYISIQQFTEMNLLSDYRFLEDVARTADHISRDAFLKRPISNKYMYFMKNRARRQGINLKLLPNGFTKRKENSTFFDKKKQQFCWHVKLQFPQSQAEYIEKRVPDDKTINEILKPYIDPEKSDPVIRQRLKAYIRSQTGVQILMKIEYMQQNLVRYYELDPYKSLLDNLRNKVIIEYPTLHVVLKGSNNDMKVLHQVKSESTKNVGNEN

SEQ ID NO: 5579 - protein, 501 aa, Homo Sapiens
MIISHFPKCVAVFALLALSVGALDTFIAAVYEHAVILPNRTETPVSKEEALLLMNKNIDVLEKAVKLAAKQGAHIIVTPEDGIYGWIFTRESIYPYLEDIPDPGVNWIPCRDPWRFGNTPVQQRLSCLAKDNSIYVVANIGDKKPCNASDSQCPPDGRYQYNTDVVFDSQGKLLARYHKYNLFAPEIQFDFPKDSELVTFDTPFGKFGIFTCFDIFSHDPAAVVVDEVSIDSILYPTAWYNTLPLLSAVPFHSAWAKAMGVNLLAANTHNTSMHMTGSGIYAPEAVKVYHYDMETESGQLLLSELKSRPRREPTYPAAVDWHAYASSVKPFSSEQSDFLGMIYFDEFTFTKLKRNTGNYTACQKDLCCHLTYKMSEKRTDEIYALGAFDGLHTVEGQYYLQICALLKCQTTDLETCGEPVGSAFTKFEDFSLSGTFGTRYVFPQIILSGSQLAPERHYEISRDGRLRSRSGAPLPVLVMALYGRVFEKDPPRLGQGSGKFQ

SEQ ID NO: 5580 - protein, 340 aa, Homo Sapiens
MKYGNPNYGGMKGILSNSWKRRYHSRRIQRDVIKKRALIGDDVGLTSYKHRHSGLVNVPEEPIEEEEEEEEEEEEEEEEDQDMDADDRVVVEYHEELPALKQPRERSASRRSSASSSDSDEMDYDLELKMISTPSPKKSMKMTMYADEVESQLKNIRNSMRADSVSSSNIKNRIGNKLPPEKFADVRHLLDEKRQHSRPRPPVSSTKSDIRQRLGKRPHSPEKAFSSNPVVRREPSSDVHSRLGVPRQDSKGLYADTREKKSGNLWTRLGSAPKTKEKNTKKVDHRAPGAEEDDSELQRAWGALIKEKEQSRQKKSRLDNLPSLQIEVSRESSSGSEAES

SEQ ID NO: 5581 - protein, 623 aa, Homo Sapiens
MEHAVAPCVLYPGTEPGAAGESESEGAASPAQTPCSLGASLCFSSGEESPPQSLASAAEGAATSPPSSGGPRVVERQWEAGSAGAASPEELASPEERACPEEPAAPSPEPRVWLEDPASPEEPGEPAPVPPGFGAVYGEPDLVLEVSGRRLRAHKAVLAARSDYFRARASRDVLRVQGVSLTALRLLLADAYSGRMAGVRPDNVAEVVAGARRLQLPGAAQRATDAVGPQLSLANCYEVLSAAKRQRLNELRDAAYCFMSDHYLEVLREPAVFGRLSGAERDLLLRRRLRAGRAHLLAAALGPAGERAGSRPQSPSGDADARGDAAVYCFHAAAGEWRELTRLPEGAPARGCGLCVLYNYLFVAGGVAPAGPDGRARPSDQVFCYNPATDSWSAVRPLRQARSQLRLLALDGHLYAVGGECLLSVERYDPRADRWAPVAPLPRGAFAVAHEATTCHGEIYVSGGSLFYRLLKYDPRRDEWQECPCSSSRERSADMVALDGFIYRFDLSGSRGEAQAAGPSGVSVSRYHCLAKQWSPCVAPLRLPGGPTGLQPFRCAALDGAIYCVSRAGTWRFQPAREGEAGGDAGQGGGFEALGAPLDVRGVLIPFALSLPEKPPRGEQGAP

SEQ ID NO: 5582 - protein, 354 aa, Homo Sapiens
MPRRSLHAAAVLLLVILKEQPSSPAPVNGSKWTYFGPDGENSWSKKYPSCGGLLQSPIDLHSDILQYDASLTPLEFQGYNLSANKQFLLTNNGHSVKLNLPSDMHIQGLQSRYSATQLHLHWGNPNDPHGSEHTVSGQHFAAELHIVHYNSDLYPDASTASNKSEGLAVLAVLIEMGSFNPSYDKIFSHLQHVKYKGQEAFVPGFNIEELLPERTAEYYRYRGSLTTPPCNPTVLWTVFRNPVQISQEQLLALETALYCTHMDDPSPREMINNFRQVQKFDERLVYTSFSQVQVCTAAGLSLGIILSLALAGILGICIVVVVSIWLFRRKSIKKGDNKGVIYKPATKMETEAHA

SEQ ID NO: 5583 - protein, 1040 aa, Homo Sapiens
TIAIFHLKYPVFYCSEHPVFLILMMSEGKPPDKKRPRRSLSISKNKKKASNSIISCFNNAPPAKLACPVCSKMVPRYDLNRHLDEMCANNDFVQVDPGQVGLINSNVSMVDLTSVTLEDVTPKKSPPPKTNLTPGQSDSAKREVKQKISPYFKSNDVVCKNQDELRNRSVKVICLGSLASKLSRKYVKAKKSIDKDEEFAGSSPQSSKSTVVKSLIDNSSEIEDEDQILENSSQKENVFKCDSLKEECIPEHMVRGSKIMEAESQKATRECEKSALTPGFSDNAIMLFSPDFTLRNTLKSTSEDSLVKQECIKEVVEKREACHCEEVKMTVASEAKIQLSDSEAKSHSSADDASAWSNIQEAPLQDDSCLNNDIPHSIPLEQGSSCNGPGQTTGHPYYLRSFLVVLKTVLENEDDMLLFDEQEKGIVTKFYQLSATGQKLYVRLFQRKLSWIKMTKLEYEEIALDLTPVIEELTNAGFLQTESELQELSEVLELLSAPELKSLAKTFHLVNPNGQKQQLVDAFLKLAKQRSVCTWGKNKPGIGAVILKRAKALAGQSVRICKGPRAVFSRILLLFSLTDSMEDEDAACGGQGQLSTVLLVNLGRMEFPSYTINRKTHIFQDRDDLIRYAAATHMLSDISSAMANGNWEEAKELAQCAKRDWNRLKNHPSLRCHEDLPLFLRCFTVGWIYTRILSRFVEILQRLHMYEEAVRELESLLSQRIYCPDSRGRWWDRLALNLHQHLKRLEPTIKCITEGLADPEVRTGHRLSLYQRAVRLRESPSCKKFKHLFQQLPEMAVQDVKHVTITGRLCPQRGMCKSVFVMEAGEAADPTTVLCSVEELALAHYRRSGFDQGIHGEGSTFSTLYGLLLWDIIFMDGIPDVFRNACQAFPLDLCTDSFFTSRRPALEARLQLIHDAPEESLRAWVAATWHEQEGRVASLVSWDRFTSLQQAQDLVSCLGGPVLSGVCRHLAADFRHCRGGLPDLVVWNSQSRHFKLVEVKGPNDRLSHKQMIWLAELQKLGAEVEVCHVVAVGAKSQSLS

SEQ ID NO: 5584 - protein, 422 aa, Homo Sapiens
MCNLKDIPNLTALVRLEELELSGNRLDLIRPGSFQGLTSLRKLWLMHAQVATIERNAFDDLKSLEELNLSHNNLMSLPHDLFTPLHRLERVHLNHNPWHCNCDVLWLSWWLKETVPSNTTCCARCHAPAGLKGRYIGELDQSHFTCYAPVIVEPPTDLNVTEGMAAELKCRTGTSMTSVNWLTPNGTLMTHGSYRVRISVLHDGTLNFTNVTVQDTGQYTCMVTNSAGNTTASATLNVSAVDPVAAGGTGSGGGGPGGSGGVGGGSGGYTYFTTVTVETLETQPGEEALQPRGTEKEPPGPTTDGVWGGGRPGDAAGPASSSTTAPAPRSSRPTEKAFTVPITDVTENALKDLDDVMKTTKIIIGCFVAITFMAAVMLVAFYKLRKQHQLHKHHGPTRTVEIINVEDELPAASAVSVAAAAA

SEQ ID NO: 5585 - protein, 367 aa, Homo Sapiens
PVEYLNNPIITQFFPTLLLWCFSALLPTIVYYSAFFEAHWTRSGENRTTMHKCYTFLIFMVLLLPSLGLSSLDLFFRWLFDKKFLAEAAIRFECVFLPDNGAFFVNYVIASAFIGNAMDLLRIPGLLMYMIRLCLARSAAERRNVKRHQAYEFQFGAAYAWMMCVFTVVMTYSITCPIIVPFGLMYMLLKHLVDRYNLYYAYLPAKLDKKIHSGAVNQVVAAPILCLFWLLFFSTMRTGFLAPTSMFTFVVLVITIVICLCHVCFGHFKYLSAHNYKIEHTETDTVDPRSNGRPPTAAAVPKSAKYIAQVLQDSEVDGDGDGAPGSSGDEPPSSSSQDEELLMPPDALTDTDFQSCEDSLIENEIHQ

SEQ ID NO: 5586 - protein, 540 aa, Homo Sapiens
SLYCSDIGKLVGCAIIHVNGDSPEEVVRATRLAFEYQRQFRKDVIIDLLCYRQWGHNELDEPFYTNPIMYKIIRARKSIPDTYAEHLIAGGLMTQEEVSEIKSSYYAKLNDHLNNMAHYRPPALNLQAHWQGLAQPEAQITTWSTGVPLDLLRFVGMKSVEVPRELQMHSHLLKTHVQSRMEKMMDGIKLDWATAEALALGSLLAQGFNVRLSGQDVGRGTFSQRHAMVVCQETDDTYIPLNHMDPNQKGFLEVSNSPLSEEAVLGFEYGMSIESPKLLPLWEAQFGDFFNGAQIIFDTFISGGEAKWLLQSGIVILLPHGYDGAGPDHSSCRIERFLQMCDSAEEGVDGDTVNMFVVHPTTPAQYFHLLRRQMVRNFRKPLIVASPKMLLRLPAAVSTLQEMAPGTTFNPVIGDSSVDPKKVKTLVFCSGKHFYSLVKQRESLGAKKHDFAIIRVEELCPFPLDSLQQEMSKYKHVKDHIWSQEEPQNMGPWSFVSPRFEKQLACKLRLVGRPPLPVPAVGIGTVHLHQHEDILAKTFA

SEQ ID NO: 5587 - protein, 1406 aa, Homo Sapiens
ACRSRMAPQMYEFHLPLSPEELLKSGGVNQYVVQEVLSIKHLPPQLRAFQAAFRAQGPLAMLQHFDTIYSILHHFRSIDPGLKEDTLEFLIKVVSRHSQELPAILDDTTLSGSDRNAHLNALKMNCYALIRLLESFETMASQTNLVDLDLGGKGKKARTKAAHGFDWEEERQPILQLLTQLLQLDIRHLWNHSIIEEEFVSLVTGCCYRLLENPTINHQKNRPTREAITHLLGVALTRYNHMLSATVKIIQMLQHFEHLAPVLVAAVSLWATDYGMKSIVGEIVREIGQKCPQELSRDPSGTKGFAAFLTELAERVPAILMSSMCILLDHLDGENYMMRNAVLAAMAEMVLQVLSGDQLEAAARDTRDQFLDTLQAHGHDVNSFVRSRVLQLFTRIVQQKALPLTRFQAVVALAVGRLADKSVLVCKNAIQLLASFLANNPFSCKLSDADLAGPLQKETQKLQEMRAQRRTAAASAVLDPEEEWEAMLPELKSTLQQLLQLPQGEEEIPEQIANTETTEDVKGRIYQLLAKASYKKAIILTREATGHFQESEPFSHIDPEESEETRLLNILGLIFKGPAASTQEKNPRESTGNMVTGQTVCKNKPNMSDPEESRGNDELVKQEMLVQYLQDAYSFSRKITEAIGIISKMMYENTTTVVQEVIEFFVMVFQFGVPQALFGVRRMLPLIWSKEPGVREAVLNAYRQLYLNPKGDSARAKAQALIQNLSLLLVDASVGTIQCLEEILCEFVQKDELKPAVTQLLWERATEKVACCPLERCSSVMLLGMMARGKPEIVGSNLDTLVSIGLDEKFPQDYRLAQQVCHAIANISDRRKPSLGKRHPPFRLPQEHRLFERLRETVTKGFVHPDPLWIPFKEVAVTLIYQLAEGPEVICAQILQGCAKQALEKLEEKRTSQEDPKESPAMLPTFLLMNLLSLAGDVALQQLVHLEQAVSGELCRRRVLREEQEHKTKDPKEKNTSSETTMEEELGLVGATADDTEAELIRGICEMELLDGKQTLAAFVPLLLKVCNNPGLYSNPDLSAAASLALGKFCMISATFCDSQLRLLFTILEKSPLPIVRSNLMVATGDLAIRFPNLVDPWTPHLYARLRDPAQQVRKTAGLVMTHLILKDMVKVKGQVSEMAVLLIDPEPQIAALAKNFFNELSHKGNAIYNLLPDIISRLSDPELGVEEEPFHTIMKQLLSYITKDKQTESLVEKLCQRFRTSLTERQQRDLAYCVSQLPLTERGLRKMLDNFDCFGDKLSDESIFSAFLSVVGKLRRGAKPEGKAIIDEFEQKLRACHTRGLDGIKELEIGQAGSQRAPSAKKPSTGSRYQPLASTASDNDFVTPEPRRTTRRHPNTQQRASKKKPKVVFSSDESSEEDLSAEMTEDETPKKTTPILRASARRHRS

SEQ ID NO: 5588 - protein, 916 aa, Homo Sapiens
MVQKESQATLEERESELSSNPAASAGASLEPPAAPAPGEDNPAGAGGAAVAGAAGGARRFLCGVVEGFYGRPWVMEQRKELFRRLQKWELNTYLYAPKDDYKHRMFWREMYSVEEAEQLMTLISAAREYEIEFIYAISPGLDITFSNPKEVSTLKRKLDQVSQFGCRSFALLFDDIDHNMCAADKEVFSSFAHAQVSITNEIYQYLGEPETFLFCPTEYCGTFCYPNVSQSPYLRTVGEKLLPGIEVLWTGPKVVSKEIPVESIEEVSKIIKRAPVIWDNIHANDYDQKRLFLGPYKGRSTELIPRLKGVLTNPNCEFEANYVAIHTLATWYKSNMNGVRKDVVMTDSEDSTVSIQIKLENEGSDEDIETDVLYSPQMALKLALTEWLQEFGVPHQYSSRQVAHSGAKASVVDGTPLVAAPSLNATTVVTTVYQEPIMSQGAALSGEPTTLTKEEEKKQPDEEPMDMVVEKQEETDHKNDNQILSEIVEAKMAEELKPMDTDKESIAESKSPEMSMQEDCISDIAPMQTDEQTNKEQFVPGPNEKPLYTAEPVTLEDLQLLADLFYLPYEHGPKGAQMLREFQWLRANSSVVSVNCKGKDSEKIEEWRSRAAKFEEMCGLVMGMFTRLSNCANRTILYDMYSYVWDIKSIMSMVKSFVQWLGCRSHSSAQFLIGDQEPWAFRGGLAGEFQRLLPIDGANDLFFQPPPLTPTSKVYTIRPYFPKDEASVYKICREMYDDGVGLPFQSQPDLIGDKLVGGLLSLSLDYCFVLEDEDGICGYALGTVDVTPFIKKCKISWIPFMQEKYTKPNGDKELSEAEKIMLSFHEEQEVLPETFLANFPSLIKMDIHKKVTDPSVAKSMMACLLSSLKANGSRGAFCEVRPDDKRILEFYSKLGCFEIAKMEGFPKDVVILGRSL

SEQ ID NO: 5589 - protein, 438 aa, Homo Sapiens
SWNLLANHHHQLSLIHEQEWVRGEGKEVNMKLKQRVVLLAILLVIFIFTKVFLIDNLDTSAANREDQRAFHRMMTGLRVELAPKLDHTLQSPWEIAAQWVVPREVYPEETPELGAVMHAMATKKIIKADVGYKGTQLKALLILEGGQKVVFKPKRYSRDHVVEGEPYAGYDRHNAEVAAFHLDRILGFHRAPLVVGRFVNLRTEIKPVATEQLLSTFLTVGNNTCFYGKCYYCRETEPACADGDIMEGSVTLWLPDVWPLQKHRHPWGRTYREGKLARWEYDESYCDAVKKTSPYDSGPRLLDIIDTAVFDYLIGNADRHHYESFQDDEGASMLILLDNAKSFGNPSLDERSILAPLYQCCIIRVSTWNRLNYLKNGVLKSALKSAMAHDPISPVLSDPHLDAVDQRLLSVLATVKQCTDQFGMDTVLVEDRMPLSHL

SEQ ID NO: 5590 - protein, 288 aa, Homo Sapiens
MKPSGEDQAALAAGPWEECFQAAVQLALRAGQIIRKALTEEKRVSTKTSAADLVTETDHLVEDLIISELRERFPSHRFIAEEAAASGAKCVLTHSPTWIIDPIDGTCNFVHRFPTVAVSIGFAVRQELEFGVIYHCTEERLYTGRRGRGAFCNGQRLRVSGETDLSKALVLTEIGPKRDPATLKLFLSNMERLLHAKAHGVRVIGSSTLALCHLASGAADAYYQFGLHCWDLAAATVIIREAGGIVIDTSGGPLDLMACRVVAASTREMAMLIAQALQTINYGRDDEK

SEQ ID NO: 5591 - protein, 554 aa, Homo Sapiens
  misc_feature (107)..(107): Xaa can be any naturally occurring amino acid
MAEAATGFLEQLKSCIVWSWTYLWTVWFFIVLFLVYILRVPLKINDNLSTVSMFLNTLTPKFYVALTGTSSLISGLILIFEWWYFRKYGTSFIEQVSVSHLRPLLGXVDNNSSNNSNSSNGDSDSNRQSVSECKVWRNPLNLFRGAEYNRYTWVTGREPLTYYDMNLSAQDHQTFFTCDSDHLRPADAIMQKAWRERNPQARISAAHEALEINECATAYILLAEEEATTIAEAEKLFKQALKAGDGCYRRSQQLQHHGSQYEAQHRRDTNVLVYIKRRLAMCARRLGRTREAVKMMRDLMKEFPLLSMFNIHENLLEALLELQAYADVQAVLAKYDDISLPKSATICYTAALLKARAVSDKFSPEAASRRGLSTAEMNAVEAIHRAVEFNPHVPKYLLEMKSLILPPEHILKRGDSEAIAYAFFHLAHWKRVEGALNLLHCTWEGTFRMIPYPLEKGHLFYPYPICTETADRELLPSFHEVSVYPKKELPFFILFTAGLCSFTAMLALLTHQFPELMGVFAKAFLSTLFAPLNFVMEKVESILPSSLWHQLTRI

SEQ ID NO: 5592 - protein, 261 aa, Homo Sapiens
MSKSGFGSYGSISAADGASGGSDQLCERDATPAIKTQRPKVRIQDVVPCNVNQLLSSTVFDPVFKVRGIIVSQVSIVGVIRGAEKASNHICYKIDDMTAKPIEARQWFGREKVKQVTPLSVGVYVKVFGILKCPTGTKSLEVLKIHVLEDMNEFTVHILETVNAHMMLDKARRDTTVESVPVSPSEVNDAGDNDESHRNFIQDEVLRLIHECPHQEGKSIHELRAQLCDLSVKAIKEAIDYLTVEGHIYPTVDREHFKSAD

SEQ ID NO: 5593 - protein, 1505 aa, Homo Sapiens
GSKRSQADTPSRVDPGNLISWPPPHPPPSTSWSSDLPPSRLHFPPLPGPGFSSHQPDSLPSAQGKRLPPPGRFQEAPGQAPALFRPWGQHPSQPNTMKSSGPVERLLRALGRRDSSRAASRPRKAEPHSFREKVFRKKPPVCAVCKVTIDGTGVSCRVCKVATHRKCEAKVTSACQALPPVELRRNTAPVRRIEHLGSTKSLNHSKQRSTLPRSFSLDPLMERRWDLDLTYVTERILAAAFPARPDEQRHRGHLRELAHVLQSKHRDKYLLFNLSEKRHDLTRLNPKVQDFGWPELHAPPLDKLCSICKAMETWLSADPQHVVVLYCKGNKGKLGVIVSAYMHYSKISAGADQALATLTMRKFCEDKVATELQPSQRRYISYFSGLLSGSIRMNSSPLFLHYVLIPMLPAFEPGTGFQPFLKIYQSMQLVYTSGVYHIAGPGPQQLCISLEPALLLKGDVMVTCYHKGGRGTDRTLVFRVQFHTCTIHGPQLTFPKDQLDEAWTDERFPFQASVEFVFSSSPEKIKGSTPRNDPSVSVDYNTTEPAVRWDSYENFNQHHEDSVDGSLTHTRGPLDGSPYAQVQRPPRQTPPAPSPEPPPPPMLSVSSDSGHSSTLTTEPAAESPGRPPPTAAERQELDRLLGGCGVASGGRGAGRETAILDDEEQPTVGGGPHLGVYPGHRPGLSRHCSCRQGYREPCGVPNGGYYRPEGTLERRRLAYGGYEGSPQGYAEASMEKRRLCRSLSEGLYPYPPEMGKPATGDFGYRAPGYREVVILEDPGLPALYPCPACEEKLALPTAALYGLRLEREAGEGWASEAGKPLLHPVRPGHPLPLLLPACGHHHAPMPDYSCLKPPKAGEEGHEGCSYTMCPEGRYGHPGYPALVTYSYGGAVPSYCPAYGRVPHSCGSPGEGRGYPSPGAHSPRAGSISPGSPPYPQSRKLSYEIPTEEGGDRYPLPGHLASAGPLASAESLEPVSWREGPSGHSTLPRSPRDAPCSASSELSGPSTPLHTSSPVQGKESTRRQDTRSPTSAPTQRLSPGEALPPVSQAGTGKAPELPSGSGPEPLAPSPVSPTFPPSSPSDWPQERSPGGHSDGASPRSPVPTTLPGLRHAPWQGPRGPPDSPDGSPLTPVPSQMPWLVASPEPPQSSPTPAFPLAASYDTNGLSQPPLPEKRHLPGPGQQPGPWGPEQASSPARGISHHVTFAPLLSDNVPQTPEPPTQESQSNVKFVQDTSKFWYKPHLSRDQAIALLKDKDPGAFLIRDSHSFQGAYGLALKVATPPPSAQPWKGDPVEQLVRHFLIETGPKGVKIKGCPSEPYFGSLSALVSQHSISPISLPCCLRILSKDPLEETPEAPVPTNMSTAADLLRQGAACSVLYLTSVETESLTGPQAVARASSAALSCSPRPTPAVVHFKVSAQGITLTDNQRKLFFRRHYPVNSITFSSTDPQDRRWTNPDGTTSKIFGFVAKKPGSPWENVCHLFAELDPDQPAGAIVTFITKVLLGQRK

SEQ ID NO: 5594 - protein, 1050 aa, Homo Sapiens
WRRAACGRSGRASLKEHPRGTLLSDGSPALSRNVGMTVSQKGGPQPTPSPAGPGTQLGPITGEMDEADSAFLKFKQTADDSLSLTSPNTESIFVEDPYTASLRSEIESDGHEFEAESWSLAVDAAYAKKQKREVVKRQDVLYELMQTEVHHVRTLKIMLKVYSRALQEELQFSSKAIGRLFPCADDLLETHSHFLARLKERRQESLEEGSDRNYVIQKIGDLLVQQFSGENGERMKEKYGVFCSGHNEAVSHYKLLLQQNKKFQNLIKKIGNFSIVRRLGVQECILLVTQRITKYPVLVERIIQNTEAGTEDYEDLTQALNLIKDIISQVDAKVSECEKGQRLREIAGKMDLKSSSKLKNGLTFRKEDMLQRQLHLEGMLCWKTTSGRLKDILAILLTDVLLLLQEKDQKYVFASVDSKPPVISLQKLIVREVANEEKAMFLISASLQGPEMYEIYTSSKEDRNAWMAHIQRAVESCPDEEEGPFSLPEEERKVVEARATRLRDFQERLSMKDQLIAQSLLEKQQIYLEMAEMGGLEDLPQPRGLFRGGDPSETLQGELILKSAMSEIEGIQSLICRRLGSANGQAEDGGSSTGPPRRAETFAGYDCTNSPTKNGSFKKKVSSTDPRPRDWRGPPNSPDLKLSDSDIPGSSEESPQVVEAPGTESDPRLPTVLESELVQRIQTLSQLLLNLQAVIAHQDSYVETQRAAIQEREKQFRLQSTRGNLLLEQERQRNFEKQREERAALEKLQSQLRHEQQRWERERQWQHQELERAGARLQEREGEARQLRERLEQERAELERQRQAYQHDLERLREAQRAVERERERLELLRRLKKQNTAPGALPPDTLAEAQPPSHPPSFNGEGLEGPRVSMLPSGVGPEYAERPEVARRDSAPTESRLAKSDVPIQLLSATNQFQRQAAVQQQIPTKLAASTKGGKDKGGKSRGSQRWESSASFDLKQQLLLNKLMGKDESTSRNRRSLSPILPGRHSPAPPPDPGFPAPSPPPADSPSEGFSLKAGGTALLPGPPAPSPLPATPLSAKEDASKEDVIFF

SEQ ID NO: 5595 - protein, 355 aa, Homo Sapiens
ERCTMPDEPLVRAPDKGTDSPSPPPLEETSNGGRMLHESLRHAVPITRMQSSEDTEAGPAYSDEDYEEDIIEPRTLNEITTVTDKTSPWSSVISDTSEVISPQPDEVQREGPSCPSPGPFCREELMVKSSFLSSPERAVNPHLPRQGSPSQSLVACECEASKARVGGESASANPQPIPCPTLSGAQQSSTFVGWSSPQTDQNKEPKSEAPAENEAATSELGDSADSFKKLPLNLASQSRRENHKGPPIDSSDIRQRQVTTGSETSTKQSLLLPGPIVVPNFFLPPQQLEASLRMLSLSATLPPAATTDQDKSEATRGALSQRPCRPRPNSLPLNLPEEETLRIARIFSSQYSQKD

SEQ ID NO: 5596 - protein, 853 aa, Homo Sapiens
MGTPRAQHPPPPQLLFLILLSCPWIQGLPLKEEEILPEPGSETPTVASEALAELLHGALLRRGPEMGYLPGPPLGPEGGEEETTTTIITTTTVTTTVTSPVLCNNNISEGEGYVESPDLGSPVSRTLGLLDCTYSIHVYPGYGIEIQVQTLNLSQEEELLVLAGGGSPGLAPRLLANSSMLGEGQVLRSPTNRLLLHFQSPRVPRGGGFRIHYQAYLLSCGFPPRPAHGDVSVTDLHPGGTATFHCDSGYQLQGEETLICLNGTRPSWNGETPSCMASCGGTIHNATLGRIVSPEPGGAVGPNLTCRWVIEAAEGRRLHLHFERVSLDEDNDRLMVRSGGSPLSPVIYDSDMDDVPERGLISDAQSLYVELLSETPANPLLLSLRFEAFEEDRCFAPFLAHGNVTTTDPEYRPGALATFSCLPGYALEPPGPPNAIECVDPTEPHWNDTEPACKAMCGGELSEPAGVVLSPDWPQSYSPGQDCVWGVHVQEEKRILLQVEILNVREGDMLTLFDGDGPSARVLAQLRGPQPRRRLLSSGPDLTLQFQAPPGPPNPGLGQGFVLHFKEVPRNDTCPELPPPEWGWRTASHGDLIRGTVLTYQCEPGYELLGSDILTCQWDLSWSAAPPACQKIMTCADPGEIANGHRTASDAGFPVGSHVQYRCLPGYSLEGAAMLTCYSRDTGTPKWSDRVPKCALKYEPCLNPGVPENGYQTLYKHHYQAGESLRFFCYEGFELIGEVTITCVPGHPSQWTSQPPLCKVAYEELLDNRKLEVTQTTDPSRQLEGGNLALAILLPLGLVIVLGSGVYIYYTKLQGKSLFGFSGSHSYSPITVESDFSNPLYEAGDTREYEVSI

SEQ ID NO: 5597 - protein, 1819 aa, Homo Sapiens
EVRYPPILHCAFLGAQGLFLDCLCWSTLAYLVPGPPGSLMVGGLTESFIMTQNWLEELVGRLRWGPAPLLTPRGIWEAEVTRAFGALVWIRGDQHAGDLLQLPPAVQELLLSLVRDAAGKEDIIEWLSRFGISDSHSDPEVLICPPQQQKEAPAMVSVGESPGPFVDMGTLQNRGPENSKRLSSLGATGSLITAQSTPQEAANQLVRVGSNNQDGMDSAQEEGTVQATSSQDSTNHTQALLKQRQVQKIEDKLLFQPPVSALGVCPPWKAWTPGPAFGPLWPGAIAATFWRINELHSLHLAWLLSQACFNFPFWQRPLGPIQLKLPGQNPLPLNLEWKQKELAPLPSAESPAGRPDGGLGGEAALQNCPRPEISPKVTSLLVVPGSSDVKDKVSSDLPQIGPPLTSTPQLQAGGEPGDQGSMQLDFKGLEEGPAPVLPTGQGKPVAQGGLTDQSVPGAQTVPETLKVPMAAAVPKAENPSRTQVPSAAPKLPTSRMMLAVHTEPAAPEVPLAPTKPTAQLMATAQKTVVNQPVLVAQVEPTTPKTPQAQKMPVAKTSPAGPKTPKAQAGPAATVSKAPAASKAPAAPKVPVTPRVSRAPKTPAAQKVPTDAGPTLDVARLLSEVQPTSRASVSLLKGQGQAGRQGPQSSGTLALSSKHQFQMEGLLGAWEGAPRQPPRHLQANSTVTSFQRYHEALNTPFELNLSGEPGNQGLRRVVIDGSSVAMVHGLQHFFSCRGIAMAVQFFWNRGHREVTVFVPTWQLKKNRRVRESHFLTKLHSLKMLSITPSQLENGKKITTYDYRFMVKLAEETDGIIVTNEQIHILMNSSKKLMVKDRLLPFTFAGNLFMVPDDPLGRDGPTLDEFLKKPNRLDTDIGNFLKVWKTLPPSSASVTELSDDADSGPLESLPNMEEVREEKEERQDEEQRQGQGTQKAAEEDDLDSSLASVFRVECPSLSEEILRCLSLHDPPDGALDIDLLPGAASPYLGIPWDGKAPCQQVLAHLAQLTIPSNFTALSFFMGFMDSHRDAIPDYEALVGPLHSLLKQKPDWQWDQEHEEAFLALKRALVSALCLMAPNSQLPFRLEVTVSHVALTAILHQEHSGRKHPIAYTSKPLLPDEESQGPQSGGDSPYAVAWALKHFSRCIGDTPVVLDLSYASRTTADPEVREGRRVSKAWLIRWSLLVQDKGKRALELALLQGLLGENRLLTPAASMPRFFQVLPPFSDLSTFVCIHMSGYCFYREDEWCAGFGLYVLSPTSPPVSLSFSCSPYTPTYAHLAAVACGLERFGQSPLPVVFLTHCNWIFSLLWELLPLWRARGFLSSDGAPLPHPSLLSYIISLTSGLSSLPFIYRTSYRGSLFAVTVDTLAKQGAQGGGQWWSLPKDVPAPTVSPHAMGKRPNLLALQLSDSTLADIIARLQAGQKLSGSSPFSSAFNSLSLDKESGLLMFKGDKKPRVWVVPTQLRRDLIFSVHDIPLGAHQRPEETYKKLRLLGWWPGMQEHVKDYCRSCLFCIPRNLIGSELKVIESPWPLRSTAPWSNLQIEVVGPVTISEEGHKHVLIVADPNTRWVEAFPLKPYTHTAVAQVLLQHVFARWGVPVRLEAAQGPQFARHVLVSCGLALGAQVASLSRDLQFPCLTSSGAYWEFKRALKEFIFLHGKKWAASLPLLHLAFRASSTDATPFKVLTGGESRLTEPLWWEMSSANIEGLKMDVFLLQLVGELLELHWRVADKASEKAENRRFKRESQEKEWNVGDQVLLLSLPRNGSSAKWVGPFYIGDRLSLSLYRIWGFPTPEKLGCIYPSSLMKAFAKSGTPLSFKVLEQ

SEQ ID NO: 5598 - protein, 560 aa, Homo Sapiens
MEFRQEEFRKLAGRALGKLHRLLEKRQEGAETLELSADGRPVTTQTRDPPVVDCTCFGLPRRYIIAIMSGLGFCISFGIRCNLGVAIVSMVNNSTTHRGGHVVVQKAQFSWDPETVGLIHGSFFWGYIVTQIPGGFICQKFAANRVFGFAIVATSTLNMLIPSAARVHYGCVIFVRILQGLVEGVTYPACHGIWSKWAPPLERSRLATTAFCGSYAGAVVAMPLAGVLVQYSGWSSVFYVYGSFGIFWYLFWLLVSYESPALHPSISEEERKYIEDAIGESAKLMNPLTKFSTPWRRFFTSMPVYAIIVANFCRSWTFYLLLISQPAYFEEVFGFEISKVGLVSALPHLVMTIIVPIGGQIADFLRSRRIMSTTNVRKLMNCGGFGMEATLLLVVGYSHSKGVAISFLVLAVGFSGFAISGFNVNHLDIAPRYASILMGISNGVGTLSGMVCPIIVGAMTKHKTREEWQYVFLIASLVHYGGVIFYGVFASGEKQPWAEPEEMSEEKCGFVGHDQLAGSDDSEMEDEAEPPGAPPAPPPSYGATHSTFQPPRPPPPVRDY

SEQ ID NO: 5599 - protein, 247 aa, Homo Sapiens
MAAEADGPLKRLLVPILLPEKCYDQLFVQWDLLHVPCLKILLSKGLGLGIVAGSLLVKLPQVFKIRGAKSAEGLSLQSVMLELVALTGTMVYSITNNFPFSSWGEALFLMLQTITICFLVMHYRGQTVKGVAFLACYGLVLLVLLSPLTPLTVVTLLQASNVPAVVVGRLLQAATNYHNGYTGQLSAITVFLLFGGSLARIFTSIQETGDPLMAGTFVVSSLCNGLIAAQLLFYWNAKPPHKQKKAQ

SEQ ID NO: 5600 - protein, 534 aa, Homo Sapiens
MGYSSGVTNGLNDASDSIYTKGTPEIAFWGSNAGVKTTRLEAHSEMGSTEILEKETPENLSNGTSSNVEAAKRLAKRLYQLDRFKRSDVAKHLGKNNEFSKLVAEEYLKFFDFTGMTLDQSLRYFFKAFSLVGETQERERVLIHFSNRYFYCNPDTIASQDGVHCLTCAIMLLNTDLHGHVNIGKKMTCQEFIANLQGVNEGVDFSKDLLKALYNSIKNEKLEWAVDDEEKKKSPSESTEEKANGTHPKTISRIGSTTNPFLDIPHDPNAAVYKSGFLARKIHADMDGKKTPRGKRGWKTFYAVLKGTVLYLQKDEYKPEKALSEEDLKNAVSVHHALASKATDYEKKPNVFKLKTADWRVLLFQTQSPEEMQGWINKINCVAAVFSAPPFPAAIGSQKKFSRPLLPATTTKLSQEEQLKSHESKLKQITTELAEHRSYPPDKKVKAKDVDEYKLKDHYLEFEKTRYEMYVSILKEGGKELLSNDESEAAGLKKSHSSPSLNPDTSPITAKVKRNVSERKDHRPETPSIKQKVT

SEQ ID NO: 5601 - protein, 1062 aa, Homo Sapiens
MVSSAQMGFNLQALLEQLSQDELSKFKYLITTFSLAHELQKIPHKEVDKADGKQLVEILTTHCDSYWVEMASLQVFEKMHRMDLSERAKDEVREAALKSFNKRKPLSLGITRKERPPLDVDEMLERFKTEAQAFTETKGNVICLGKEVFKGKKPDKDNRCRYILKTKFREMWKSWPGDSKEVQVMAERYKMLIPFSNPRVLPGPFSYTVVLYGPAGLGKTTLAQKLMLDWAEDNLIHKFKYAFYLSCRELSRLGPCSFAELVFRDWPELQDDIPHILAQARKILFVIDGFDELGAAPGALIEDICGDWEKKKPVPVLLGSLLNRVMLPKAALLVTTRPRALRDLRILAEEPIYIRVEGFLEEDRRAYFLRHFGDEDQAMRAFELMRSNAALFQLGSAPAVCWIVCTTLKLQMEKGEDPVPTCLTRTGLFLRFLCSRFPQGAQLRGALRTLSLLAAQGLWAQTSVLHREDLERLGVQESDLRLFLDGDILRQDRVSKGCYSFIHLSFQQFLTALFYTLEKEEEEDRDGHTWDIGDVQKLLSGVERLRNPDLIQAGYYSFGLANEKRAKELEATFGCRMSPDIKQELLRCDISCKGGHSTVTDLQELLGCLYESQEEELVKEVMAQFKEISLHLNAVDVVPSSFCVKHCRNLQKMSLQVIKENLPENVTASESDAEVERSQDDQHMLPFWTDLCSIFGSNKDLMGLAINDSFLSASLVRILCEQIASDTCHLQRVVFKNISPADAHRNLCLALRGHKTVTYLTLQGNDQDDMFPALCEVLRHPECNLRYLGLVSCSATTQQWADLSLALEVNQSLTCVNLSDNELLDEGAKLLYTTLRHPKCFLQRLSLENCHLTEANCKDLAAVLVVSRELTHLCLAKNPIGNTGVKFLCEGLRYPECKLQTLVLWNCDITSDGCCDLTKLLQEKSSLLCLDLGLNHIGVKGMKFLCEALRKPLCNLRCLWLWGCSIPPFSCEDLCSALSCNQSLVTLDLGQNPLGSSGVKMLFETLTCSSGTLRTLRLKIDDFNDELNKLLEEIEEKNPQLIIDTEKHHPWAERPSSHDFMI

SEQ ID NO: 5602 - protein, 430 aa, Homo Sapiens
MAEGEDVGWWRSWLQQSYQAVKEKSSEALEFMKRDLTEFTQVVQHDTACTIAATASVVKEKLATEGSSGATEKMKKGLSDFLGVISDTFAPSPDKTIDCDVITLMGTPSGTAEPYDGTKARLYSLQSDPATYCNEPDGPPELFDAWLSQFCLEEKKGEISELLVGSPSIRALYTKMVPAAVSHSEFWHRYFYKVHQLEQEQARRDALKQRAEQSISEEPGWEEEEEELMGISPISPKEAKVPVAKISTFPEGEPGPQSPCEENLVTSVEPPAEVTPSESSESISLVTQIANPATAPEARVLPKDLSQKLLEASLEEQGLAVDVGETGPSPPIHSKPLTPAGHTGGPEPRPPARVETLREEAPTDLRVFELNSDSGKSTPSNNGKKGSSTDISEDWEKDFDLDMTEEEVQMALSKVDASGELEDVEWEDWE

SEQ ID NO: 5603 - protein, 1487 aa, Homo Sapiens
AGRNAPGGLHRAVCFRRLRGSLGPCGGAAPRGFARSLTSPCSLAAAGGARAAAGDPEKGEELNVIMSGIKRTIKETDPDYEDVSVALPNKRHKAIENSARDAAVQKIETIIKEQFALEMKNKEHEIEVIDQRLIEARRMMDKLRACIVANYYASAGLLKVSEGSKTCDTMVFNHPAIKKFLESPSRSSSPANQRAETPSANHSESDSLSQHNDFLSDKDNNSNMDIEERLSNNMEQRPSRNTGRDTSRITGSHKTEQRNADLTDETSRLFVKKTIVVGNVSKYIPPDKREENDQSTHKWMVYVRGSRREPSINHFVKKVWFFLHPSYKPNDLVEVREPPFHLTRRGWGEFPVRVQVHFKDSQNKRIDIIHNLKLDRTYTGLQTLGAETVVDVELHRHSLGEDCIYPQSSESDISDAPPSLPLTIPAPVKASSPIKQSHEPVPDTSVEKGFPASTEAERHTPFYALPSSLERTPTKMTTSQKVTFCSHGNSAFQPIASSCKIVPQSQVPNPESPGKSFQPITMSCKIVSGSPISTPSPSPLPRTPTSTPVHVKQGTAGSVINNPYVIMDKQPGQVIGATTPSTGSPTNKISTASQVSQGTGSPVPKIHGSSFVTSTVKQEDSLFASMPPLCPIGSHPKVQSPKPITGGLGAFTKVIIKQEPGEAPHVPATGAASQSPLPQYVTVKGGHMIAVSPQKQVITPGEGIAQSAKVQPSKVVGVPVGSALPSTVKQAVAISGGQILVAKASSSVSKAVGPKQVVTQGVAKAIVSGGGGTIVAQPVQTLTKAQVTAAGPQKSGSQGSVMATLQLPATNLANLANLPPGTKLYLTTNSKNPSGKGKLLLIPQGAILRATNNANLQSGSAASGGSGAGGGGGGGGGGGSGSGGGGSTGGGGGTAGGGTQSTAGPGGISQHLTYTSYILKQTPQGTFLVGQPSPQTSGKQLTTGSVVQGTLGVSTSSAQGQQTLKVISGQKTTLFTQAAHGGQASLMKISDSTLKTVPATSQLSKPGTTMLRVAGGVITTATSPAVALSANGPAQQSEGMAPVSSSTVSSVTKTSGQQQVCVSQATVGTCKAATPTVVSATSLVPTPNPISGKATVSGLLKIHSSQSSPQQAVLTIPSQLKPLSVNTSGGVQTILMPVNKVVQSFSTSKPPAILPVAAPTPVVPSSAPAAVAKVKTEPETPGPSCLSQEGQTAVKTEESSELGNYVIKIDHLETIQQLLTAVVKKIPLITAKSEDASCFSAKSVEQYYGWNIGKRRAAEWQRAMTMRKVLQEILEKNPRFHHLTPLKTKHIAHWCRCHGYTPPDPESLRNDGDSIEDVLTQIDSEPECPSSFSSADNLCRKLEDLQQFQKREPENEEEVDILSLSEPVKINIKKEQEEKQEEVKFYLPPTPGSEFIGDVTQKIGITLQPVALHRNVYASVVEDMILKATEQLVNDILRQALAVGYQTASHNRIPKEITVSNIHQAICNIPFLDFLTNKHMGILNEDQ

SEQ ID NO: 5604 - protein, 1907 aa, Homo Sapiens
DLRRQLLSGHLTQDQVREVKRHITVRLDWGNEHLGLDLVPRKDFEVVDSDQISVSDLYKMHLSSRQSVQQSTSQVDTMRPRHGETCRMPVPHHFFLSLKSFTYNTIGEDTDVFFSLYDMREGKQISERFLVRLNKNGGPRNPEKIERMCALFTDLSSKDMKRDLYIVAHVIRIGRMLLNDSKKGPPHLHYRRPYGCAVLSILDVLQSLTEVKEEKDFVLKVYTCNNESEWSQIHENIIRKSSAKYSAPSASHGLIISLQLLRGDMEQIRRENPMIFNRGLAITRKLGFPDVIMPGDIRNDLYLTLEKGDFERGGKSVQKNIEVTMYVLYADGEILKDCISLGSGEPNRSSYHSFVLYHSNSPRWGEIIKLPIPIDRFRGSHLRFEFRHCSTKDKGEKKLFGFAFSTLMRDDGTTLSDDIHELYVYKCDENSTFNNHALYLGLPCCKEDYNGCPNIPSSLIFQRSTKESFFISTQLSSTKLTQNVDLLALLKWKAFPDRIMDVLGRLRHVSGEEIVKFLQDILDTLFVILDDNTEKYGLLVFQSLVFIINLLRDIKYFHFRPVMDTYIQKHFAGALAYKELIRCLKWYMDCSAELIRQDHIQEAMRALEYLFKFIVQSRILYSRATCGMEEEQFRSSIQELFQSIRFVLSLDSRNSETLLFTQAALLNSFPTIFDELLQMFTVQEVAEFVRGTLGSMPSTVHIGQSMDVVKLQSIARTVDSRLFSFSESRRILLPVVLHHIHLHLRQQKELLICSGILGSIFSIVKTSSLEADVMEEVEMMVESLLDVLLQTLLTIMSKSHAQEAVRGQRCPQCTAEITGEYVSCLLSLLRQMCDTHFQHLLDNFQSKDELKEFLLKIFCVFRNLMKMSVFPRDWMVMRLLTSNIIVTTVQYLSSALHKNFTETDFDFKVWNSYFSLAVLFINQPSLQLEIITSAKRKKILDKYGDMRVMMAYELFSMWQNLGEHKIHFIPGMIGPFLGVTLVPQPEVRNIMIPIFHDMMDWEQRKNGNFKQVEAELIDKLDSMVSEGKGDESYRELFSLLTQLFGPYPSLLEKVEQETWRETGISFVTSVTRLMERLLDYRDCMKGEETENKKIGCTVNLMNFYKSEINKEEMYIRYIHKLCDMHLQAENYTEAAFTLLLYCELLQWEDRPLREFLHYPSQTEWQRKEGLCRKIIHYFNKGKSWEFGIPLCRELACQYESLYDYQSLSWIRKMEASYYDNIMEQQRLEPEFFRVGFYGRKFPFFLRNKEYVCRGHDYERLEAFQQRMLSEFPQAVAMQHPNHPDDAILQCDAQYLQIYAVTPIPDYVDVLQMDRVPDRVKSFYRVNNVRKFRYDRPFHKGPKDKENEFKSLWIERTTLTLTHSLPGISRWFEVERRELVEVSPLENAIQVVENKNQELRSLISQYQHKQVHGNINLLSMCLNGVIDAAVNGGIARYQEAFFDKDYINKHPGDAEKITQLKELMQEQVHVLGVGLAVHEKFVHPEMRPLHKKLIDQFQMMRASLYHEFPGLDKLSPACSGTSTPRGNVLASHSPMSPESIKMTHRHSPMNLMGTGRHSSSSLSSHASSEAGNMVMLGDGSMGDAPEDLYHHMQLAYPNPRYQGSVTNVSVLSSSQASPSSSSLSSTHSAPSQMITSAPSSARGSPSLPDKYRHAREMMLLLPTYRDRPSSAMYPAAILENGQPPNFQRALFQQVVGACKPCSDPNLSVAEKGHYSLHFDAFHHPLGDTPPALPARTLRKSPLHPIPASPTSPQSGLDGSNSTLSGSASSGVSSLSESNFGHSSEAPPRTDTMDSMPSQAWNADEDLEPPYLPVHYSLSESAVLDSIKAQPCRSHSAPGCVIPQDPMDPPALPPKPYHPRLPALEHDEGVLLREETERPRGLHRKAPLPPGSAKEEQARMAWEHGRGEQ

SEQ ID NO: 5605 - protein, 324 aa, Homo Sapiens
IRATSDHNASMDFADLPALFGATLSQEGLQGFLVEAHPDNACSPIAPPPPAPVNGSVFIALLRRFDCNFDLKVLNAQKAGYGAAVVHNVNSNELLNMVWNSEEIQQQIWIPSVFIGERSSEYLRALFVYEKGARVLLVPDNTFPLGYYLIPFTGIVGLLVLAMGAVMIARCIQHRKRLQRNRLTKEQLKQIPTHDYQKDQYDVCAICLDEYEDGDKLRVLPCAHAYHSRCVDPWLTQTRKTCPICKQPVHRGPGDEDQEEETQGQEEGDEGEPRDHPASERTPLLGSSPTLPTSFGSLAPAPLVFPGPSTDPPLSPPSSPVILV

SEQ ID NO: 5606 - protein, 832 aa, Homo Sapiens
MKPPGSSSRQPPLAGCSLAGASCGPQRGPAGSVPASAPARTPPCRLLLVLLLLPPLAASSRPRAWGAAAPSAPHWNETAEKNLGVLADEDNTLQQNSSSNISYSNAMQKEITLPSRLIYYINQDSESPYHVLDTKARHQQKHNKAVHLAQASFQIEAFGSKFILDLILNNGLLSSDYVEIHYENGKPQYSKGGEHCYYHGSIRGVKDSKVALSTCNGLHGMFEDDTFVYMIEPLELVHDEKSTGRPHIIQKTLAGQYSKQMKNLTMERGDQWPFLSELQWLKRRKRAVNPSRGIFEEMKYLELMIVNDHKTYKKHRSSHAHTNNFAKSVVNLVDSIYKEQLNTRVVLVAVETWTEKDQIDITTNPVQMLHEFSKYRQRIKQHADAVHLISRVTFHYKRSSLSYFGGVCSRTRGVGVNEYGLPMAVAQVLSQSLAQNLGIQWEPSSRKPKCDCTESWGGCIMEETGVSHSRKFSKCSILEYRDFLQRGGGACLFNRPTKLFEPTECGNGYVEAGEECDCGFHVECYGLCCKKCSLSNGAHCSDGPCCNNTSCLFQPRGYECRDAVNECDITEYCTGDSGQCPPNLHKQDGYACNQNQGRCYNGECKTRDNQCQYIWGTKAAGSDKFCYEKLNTEGTEKGNCGKDGDRWIQCSKHDVFCGFLLCTNLTRAPRIGQLQGEIIPTSFYHQGRVIDCSGAHVVLDDDTDVGYVEDGTPCGPSMMCLDRKCLQIQALNMSSCPLDSKGKVCSGHGVCSNEATCICDFTWAGTDCSIRDPVRNLHPPKDEGPKGPSATNLIIGSIAGAILVAAIVLGGTGWGFKNVKKRRFDPTQQGPI

SEQ ID NO: 5607 - protein, 282 aa, Homo Sapiens
MPLLTQQIQDEDDQYSLVASLDNVRNLSTILKAIHFREHATCFATKNGIKVTVENAKCVQANAFIQAGIFQEFKVQEESVTFRINLTVLLDCLSIFGSSPMPGTLTALRMCYQGYGYPLMLFLEEGGVVTVCKINTQEPEETLDFDFCSTNVINKIILQSEGLREAFSELDMTSEVLQITMSPDKPYFRLSTFGNAGSSHLDYPKDSDLMEAFHCNQTQVNRYKISLLKPSTKALVLSCKVSIRTDNRGFLSLQYMIRNEDGQICFVEYYCCPDEEVPESES

SEQ ID NO: 5608 - protein, 905 aa, Homo Sapiens [sequence omitted]

SEQ ID NO: 5609 - protein, 233 aa, Homo Sapiens
MYETMEQLRNLPQQCMQEDFLVHEVTNLPVTEALIERENAAQLKKWRETRGELQYRPSRRLHGSRAIHEERRRQQPPLGPSSSLLSLPGLKSRGSRAAGGAPSPPPPVRRASAGPAPGPVVTAEGLHPSLPSPTGNSTPLGSSKETRKQEKERQKQEKERQKQEKEREKERQKQEKEREKQEKEREKQEKERQKQEKKAQGRKLSLRRKADGPPGPHDGGDRPSAEARQDAYF

SEQ ID NO: 5610 - protein, 253 aa, Homo Sapiens
ELPLRSSPSPANSTAGTIDSDGWDAGFSDIASSVPLPVSDRCFSHLQPTLLQRAKPSNFLLDRKKTDKLKKKKKRKRRDSDAPGKEGYRGGLLKLEAADPYVETPTSPTLQDIPQAPSDPCSGWDSDTPSSGSCATVSPDQVKEIKTEGKRTIVRQGKQVVFRDEDSTGNDEDIMVDSDDDSWDLVTCFCMKPFAGRPMIECNECHTWIHLSCAKIRKSNVPEVFVCQKCRDSKFDIRRSNRSRTGSRKLFLD

SEQ ID NO: 5611 - protein, 314 aa, Homo Sapiens
MGIGRSEGGRRGAALGVLLALGAALLAVGSASEYDYVSFQSDIGPYQSGRFYTKPPQCVDIPADLRLCHNVGYKKMVLPNLLEHETMAEVKQQASSWVPLLNKNCHAGTQVFLCSLFAPVCLDRPIYPCRWLCEAVRDSCEPVMQFFGFYWPEMLKCDKFPEGDVCIAMTPPNPTEASKPQGTTVCPPCDNELKSEAIIEHLCASEFALRMKIKEVKKENGDKKIVPKKKKPLKLGPIKKKDLKKLVLYLKNGADCPCHQLDNLSHHFLIMGRKVKSQYLLTAIHKWDKKNKEFKNFMKKMKNHECPTFQSVFK

SEQ ID NO: 5612 - protein, 718 aa, Homo Sapiens
MEDLGENTMVLSTLRSLNNFISQRVEGGSGLDISTSAPGSLQMQYQQSMQLEERAEQIRSKSHLIQVEREKMQMELSHKRARVELERAASTSARNYEREVDRNQELLTRIRQLQEREAGAEEKMQEQLERNRQCQQNLDAASKRLREKEDSLAQAGETINALKGRISELQWSVMDQEMRVKRLESEKQDVQEQLDLQHKKCQEANQKIQELQASQEARADHEQQIKDLEQKLSLQEQDAAIVKNMKSELVRLPRLERELEQLREESAHLREMRETNGLLQEELEGLQRKLGRQEKMQETLVGLELENERLLAKLQSWERLDQTMGLSIRTPEDLSRFVVELQQRELALKDKNSAVTSSARGLEKARQQLQEELRQVSGQLLEERKKRETHEALARRLQKRVLLLTKERDGMRAILGSYDSELTPAEYSPQLTRRMREAEDMVQKVHSHSAEMEAQLSQALEELGGQKQRADMLEMELKMLKSQSSSAEQSFLFSREEADTLRLKVEELEGERSRLEEEKRMLEAQLERRALQGDYDQSRTKVLHMSLNPTSVARQRLREDHSQLQAECERLRGLLRAMERGGTVPADLEAAAASLPSSKEVAELKKQVESAELKNQRLKEVFQTKIQEFRKACYTLTGYQIDITTENQYRLTSLYAEHPGDCLIFKATSPSGSKMQLLETEFSHTVGELIEVHLRRQDSIPAFLSSLTLELFSRQTVA

SEQ ID NO: 5613 - protein, 328 aa, Homo Sapiens [sequence omitted]

SEQ ID NO: 5614 - protein, 579 aa, Homo Sapiens
MSTASAASSSSSSSAGEMIEAPSQVLNFEEIDYKEIEVEEVVGRGAFGVVCKAKWRAKDVAIKQIESESERKAFIVELRQLSRVNHPNIVKLYGACLNPVCLVMEYAEGGSLYNVLHGAEPLPYYTAAHAMSWCLQCSQGVAYLHSMQPKALIHRDLKPPNLLLVAGGTVLKICDFGTACDIQTHMTNNKGSAAWMAPEVFEGSNYSEKCDVFSWGIILWEVITRRKPFDEIGGPAFRIMWAVHNGTRPPLIKNLPKPIESLMTRCWSKDPSQRPSMEEIVKIMTHLMRYFPGADEPLQYPCQYSDEGQSNSATSTGSFMDIASTNTSNKSDTNMEQVPATNDTIKRLESKLLKNQAKQQSESGRLSLGASRGSSVESLPPTSEGKRMSADMSEIEARIAATTGNGQPRRRSIQDLTVTGTEPGQVSSRSSSPSVRMITTSGPTSEKPTRSHPWTPDDSTDTNGSDNSIPMAYLTLDHQLQPLAPCPNSKESMAVFEQHCKMAQEYMKVQTEIALLLQRKQELVAELDQDEKDQQNTSRLVQEHKKLLDENKSLSTYYQQCKKQLEVIRSQQQKRQGTS

SEQ ID NO: 5615 - protein, 217 aa, Homo Sapiens
MEGSFSDGGALPEGLAEEAEPQGAAWSGDSGTVSQSHSSASGPWEDEGAEDGAPGRDLPLLRRAAAGYAACLLPGAGARPEVEALDASLEDLLTRVDEFVGMLDMLRGDSSHVVSEGVPRIHAKAAEMRRIYSRIDRLEAFVRMVGGRVARMEEQVTKAEAELGTFPRAFKKLLHTMNVPSLFSKSAPSRPQQAGYEAPVLFRTEDYFPCCSERPQL

SEQ ID NO: 5616 - protein, 1827 aa, Homo Sapiens
MADERKDEAKAPHWTSAPLTEASAHSHPPEIKDQGGAGEGLVRSANGFPYREDEEGAFGEHGSQGTYSNTKENGINGELTSADRETAEEVSARIVQVVTAEAVAVLKGEQEKEAQHKDQTAALPLAAEETANLPPSPPPSPASEQTVTVEEDLLTASKMEFHDQQELTPSTAEPSDQKEKESEKQSKPGEDLKHAALVSQPETTKTYPDKKDMQGTEEEKAPLALFGHTLVASLEDMKQKTEPSLVVPGIDLPKEPPTPKEQKDWFIEMPTEAKKDEWGLVAPISPGPLTPMREKDVFDDIPKWEGKQFDSPMPSPFQGGSFTLPLDVMKNEIVTETSPFAPAFLQPDDKKSLQQTSGPATAKDSFKIEEPHEAKPDKMAEAPPSEAMTLPKDAHIPVVEEHVMGKVLEEEKEAINQETVQQRDTFTPSGQEPILTEKETELKLEEKTTISDKEAVPKESKPPKPADEEIGIIQTSTEHTFSEQKDQEPTTDMLKQDSFPVSLEQAVTDSAMTSKTLEKAMTEPSALIEKSSIQELFEMRVDDKDKIEGVGAATSAELDMPFYEDKSGMSKYFETSALKEEATKSIEPGSDYYELSDTRESVHESIDTMSPMHKNGDKEFQTGKESQPSPPAQEAGYSTLAQSYPSDLPEEPSSPQERMFTIDPKVYGEKRDLHSKNKDDLTLSRSLGLGGRSAIEQRSMSINLPMSCLDSIALGFNFGRGHDLSPLASDILTNTSGSMDEGDDYLPATTPALEKAPCFPVESKEEEQIEKVKATGEESTQAEISCESPFLAKDFYKNGTVMAPDLPEMLDLAGTRSRLASVSADAEVARRKSVPSETVVEDSRTGLPPVTDENHVIVKTDSQLEDLGYCVFNKYTVPLPSPVQDSENLSGESGTFYEGTDDKVRRDLATDLSLIEVKLAAAGRVKDEFSVDKEASAHISGDKSGLSKEFDQEKKANDRLDTVLEKSEEHADSKEHAKKTEEAGDEIETFGLGVTYEQALAKDLSIPTDASSEKAEKGLSSVPEIAEVEPSKKVEQGLDFAVQGQLDVKISDFGQMASGLNIDDRRATELKLEATQDMTPSSKAPQEADAFMGVESGHMKEGTKVSETEVKQKVAKPDLVHQEAVDKEESYESSGEHESLTMESLKADEGKKETSPESSLIQDEIAVKLSVEIPCPPAVSEADLATDERADVQMEFIQGPKEESKETPDISITPSDVAEPLHETIVSEPAEIQSEEEEIEAQGEYDKLLFRSDTLQITDLGVSGAREEFVETCPSEHKGVIESVVTIEDDFITVVQTTTDEGESGSHSVRFAALEQPEVERRPSPHDEEEFEVEEAAEAQAEPKDGSPEAPASPEREEVALSEYKTETYDDYKDETTIDDSIMDADSLWVDTQDDDRSIMTEQLETIPKEEKAEKEARRSSLEKHRKEKPFKTGRGRISTPERKVAKKEPSTVSRDEVRRKKAVYKKAELAKKTEVQAHSPSRKFILKPAIKYTRPTHLSCVKRKTTAAGGESALAPSVFKQAKDKVSDGVTKSPEKRSSLPRPSSILPPRRGVSGDRDENSFSLNSSISSSARRTTRSEPIRRAGKSGTSTPTTPGSTAITPGTPPSYSSRTPGTPGTPSYPRTPHTPGTPKSAILVPSEKKVAIIRTPPKSPATPKQLRLINQPLPDLKNVKSKIGSTDNIKYQPKGGQVQIVTKKIDLSHVTSKCGSLKNIGHRPGGGRVKIESVKLDFKEKAQAKVGSLDNAHHVPGGGNVKIDSQKLNFREHAKARVDHGAEIITQSPGRSSVASPRRLSNVSSSGSINLLESPQLATLAEDVTAALAKQGL

SEQ ID NO: 5617 - protein, 336 aa, Homo Sapiens [sequence omitted]

SEQ ID NO: 5618 - protein, 404 aa, Homo Sapiens
MAAGTAVGAWVLVLSLWGAVVGAQNITARIGEPLVLKCKGAPKKPPQRLEWKLNTGRTEAWKVLSPQGGGPWDSVARVLPNGSLFLPAVGIQDEGIFRCQAMNRNGKETKSNYRVRVYQIPGKPEIVDSASELTAGVPNKVGTCVSEGSYPAGTLSWHLDGKPLVPNEKGVSVKEQTRRHPETGLFTLQSELMVTPARGGDPRPTFSCSFSPGLPRHRALRTAPIQPRVWEPVPLEEVQLVVEPEGGAVAPGGTVTLTCEVPAQPSPQIHWMKDGVPLPLPPSPVLILPEIGPQDQGTYSCVATHSSHGPQESRAVSISIIEPGEEGPTAGSVGGSGLGTLALALGILGGLGTAALLIGVILWQRRQRRGEERKAPENQEEEEERAELNQSEEPEAGESSTGGP

SEQ ID NO: 5619 - protein, 967 aa, Homo Sapiens
MQRAVPEGFGRRKLGSDMGNAERAPGSRSFGPVPTLLLLAAALLAVSDALGRPSEEDEELVVPELERAPGHGTTRLRLHAFDQQLDLELRPDSSFLAPGFTLQNVGRKSGSETPLPETDLAHCFYSGTVNGDPSSAAALSLCEGVRGAFYLLGEAYFIQPLPAASERLATAAPGEKPPAPLQFHLLRRNRQGDVGGTCGVVDDEPRPTGKAETEDEDEGTEGEDEGAQWSPQDPALQGVGQPTGTGSIRKKRFVSSHRYVETMLVADQSMAEFHGSGLKHYLLTLFSVAARLYKHPSIRNSVSLVVVKILVIHDEQKGPEVTSNAALTLRNFCNWQKQHNPPSDRDAEHYDTAILFTRQDLCGSQTCDTLGMADVGTVCDPSRSCSVIEDDGLQAAFTTAHELGHVFNMPHDDAKQCASLNGVNQDSHMMASMLSNLDHSQPWSPCSAYMITSFLDNGHGECLMDKPQNPIQLPGDLPGTSYDANRQCQFTFGEDSKHCPDAASTCSTLWCTGTSGGVLVCQTKHFPWADGTSCGEGKWCINGKCVNKTDRKHFDTPFHGSWGMWGPWGDCSRTCGGGVQYTMRECDNPVPKNGGKYCEGKRVRYRSCNLEDCPDNNGKTFREEQCEAHNEFSKASFGSGPAVEWIPKYAGVSPKDRCKLICQAKGIGYFFVLQPKVVDGTPCSPDSTSVCVQGQCVKAGCDRIIDSKKKFDKCGVCGGNGSTCKKISGSVTSAKPGYHDIITIPTGATNIEVKQRNQRGSRNNGSFLAIKAADGTYILNGDYTLSTLEQDIMYKGVVLRYSGSSAALERIRSFSPLKEPLTIQVLTVGNALRPKIKYTYFVKKKKESFNAIPTFSAWVIEEWGECSKSCELGWQRRLVECRDINGQPASECAKEVKPASTRPCADHPCPQWQLGEWSSCSKTCGKGYKKRSLKCLSHDGGVLSHESCDPLKKPKHFIDFCTMAECS

SEQ ID NO: 5620 - protein, 411 aa, Homo Sapiens
MKAARFVLRSAGSLNGAGLVPREVEHFSRYSPSPLSMKQLLDFGSENACERTSFAFLRQELPVRLANILKEIDILPTQLVNTSSVQLVKSWYIQSLMDLVEFHEKSPDDQKALSDFVDTLIKVRNRHHNVVPTMAQGIIEYKDACTVDPVTNQNLQYFLDRFYMNRISTRMLMNQHILIFSDSQTGNPSHIGSIDPNCDVVAVVQDAFECSRMLCDQYYLSSPELKLTQVNGKFPDQPIHIVYVPSHLHHMLFELFKNAMRATVEHQENQPSLTPIEVIVVLGKEDLTIKISDRGGGVPLRIIDRLFSYTYSTAPTPVMDNSRNAPLAGFGYGLPISRLYAKYFQGDLNLYSLSGYGTDAIIYLKALSSESIEKLPVFNKSAFKHYQMSSEADDWCIPSREPKNLAKEVAM

SEQ ID NO: 5621 - protein, 1972 aa, Homo Sapiens
MGQTKSTSSGGGNRKCNQEQSKNQPLDARVDKIKDKKPRKKAMESSSNSDSDSGTSSDTSSEGISSSDSDDLEEDEEEEDQSIEESEDDDSDSESEAQHKSNNQVLLHGISDPKADGQKATEKAQEKRIHQPLPLAFESQTHSFQSQQKQPQVLSQQLPFIFQSSQAKEESVNKHTSVIQSTGLVSNVKPLSLVNQAKKETYMKLIVPSPDVLKAGNKNTSEESSLLTSELRSKREQYKQAFPSQLKKQESSKSLKKVIAALSNPKATSSSPAHPKQTLENNHPNPFLTNALLGNHQPNGVIQSVIQEAPLALTTKTKMQSKINENIAAASSTPFSSPVNLSTSGRRTPGNQTPVMPSASPILHSQGKEKAVSNNVNPVKTQHHSHPAKSLVEQFRGTDSDIPSSKDSEDSNEDEEEDDEEEDEEDDEDDESDDSQSESDSNSESDTEGSEEEDDDDKDQDESDSDTEGEKTSMKLNKTTSSVKSPSMSLTGHSTPRNLHIAKAPGSAPAALCSESQSPAFLGTSSSTLTSSPHSGTSKRRRVTDERELRIPLEYGWQRETRIRNFGGRLQGEVAYYAPCGKKLRQYPEVIKYLSRNGIMDISRDNFSFSAKIRVGDFYEARDGPQEMQWCLLKEEDVIPRIRAMEGRRGRPPNPDRQRAREESRMRRRKGRPPNVGNAEFLDNADAKLLRKLQAQEIARQAAQIKLLRKLQKQEQARVAKEAKKQQAIMAAEEKRKQKEQIKIMKQQEKIKRIQQIRMEKELRAQQILEAKKKKKEEAANAKLLEAEKRIKEKEMRRQQAVLLKHQERERRRQHMMLMKAMEARKKAEEKERLKQEKRDEKRLNKERKLEQRRLELEMAKELKKPNEDMCLADQKPLPELPRIPGLVLSGSTFSDCLMVVQFLRNFGKVLGFDVNIDVPNLSVLQEGLLNIGDSMGEVQDLLVRLLSAAVCDPGLITGYKAKTALGEHLLNVGVNRDNVSEILQIFMEAHCGQTELTESLKTKAFQAHTPAQKASVLAFLINELACSKSVVSEIDKNIDYMSNLRRDKWVVEGKLRKLRIIHAKKTGKRDTSGGIDLGEEQHPLGTPTPGRKRRRKGGDSDYDDDDDDDSDDQGDEDDEDEEDKEDQKGKKTDICEDEDEGDQAASVEELEKQIEKLSKQQSQYRRKLFDASHSLRSVMFGPDRYRRRYWILPRCGGIFVEGMESGEGLEEIAKEREKLKKAESVQIKEEMFETSGDSLNCSNTDHCEQKEDLKEKDNTNLFLQKPGSFSKLSKLLEVAKMPPESEVMTPKPNAGANGCTLSYQNSGKHSLGSVQSTATQSNVEKADSNNLFNTGSSGPGKFYSPLPNDQLLKTLTEKNRQWFSLLPRTPCDDTSLTHADMSTASLVTPQSQPPSKSPSPTPAPLGSSAQNPVGLNPFALSPLQVKGGVSMMGLQFCGWPTGVVTSNIPFTLSVPSLGSGLGLSEGNGNSFLTSNVASSKSESPVPQNEKATSAQPAAVEVAKPVDFPSPKPIPEEMQFGWWRIIDPEDLKALLKVLHLRGIREKALQKQIQKHLDYITQACLKNKDVAIIELNENEENQVTRDIVENWSVEEQAMEMDLSVLQQVEDLERRVASASLQVKGWMCPEPASEREDLVYFEHKSFTKLCKEHDGEFTGEDESSAHALERKSDNPLDIAVTRLADLERNIERRIEEDIAPGLRVWRRALSEARSAAQVALCIQQLQKSIAWEKSIMKVYCQICRKGDNEELLLLCDGCDKGCHTYCHRPKITTIPDGDWFCPACIAKASGQTLKIKKLHVKGKKTNESKKGKKVTLTGDTEDEDSASTSSSLKRGNKDLQKRKMEENTSINLSKQESFTSVKKPKRDDSKDLALCSMILTEMETHEDAWPFLLPVNLKLVPGYKKVIKKPMDFSTIREKLSSGQYPNLETFALDVRLVFDNCETFNEDDSDIGRAGHNMRKYFEKKWTDTFKVS

SEQ ID NO: 5622 - protein, 158 aa, Homo Sapiens
MAISEPIKGSRKPCVNKEELALKKPMAKCAWKGPREPPQDARAEAESPGGASESDQDGGHESPPKKKAVAWVSAKNPAPMRKKKKVSLGPVSYVLVDSEDGRKKPVMPKKGPGSRREASDQKAPRGQQPAEATASTSRGPKAKPEGSPRRATNESRKV

SEQ ID NO: 5623 - protein, 520 aa, Homo Sapiens [sequence omitted]

SEQ ID NO: 5624 - protein, 881 aa, Homo Sapiens [sequence omitted]

SEQ ID NO: 5625 - protein, 293 aa, Homo Sapiens
MTEDSQRNFRSVYYEKVGFRGVEEKKSLEILLKDDRLDTEKLCTFSQRFPLPSMYRALVWKVLLGILPPHHESHAKVMMYRKEQYLDVLHALKVVRFVSDATPQAEVYLRMYQLESGKLPRSPSFPLEPDDEVFLAIAKAMEEMVEDSVDCYWITRRFVNQLNTKYRDSLPQLPKAFEQYLNLEDGRLLTHLRMCSAAPKLPYDLWFKRCFAGCLPESSLQRVWDKVVSGSCKILVFVAVEILLTFKIKVMALNSAEKITKFLENIPQDSSDAIVSKAIDLWHKHCGTPVHSS

SEQ ID NO: 5626 - protein, 338 aa, Homo Sapiens
MSGPDVETPSAIQICRIMRPDDANVAGNVHGGTILKMIEEAGAIISTRHCNSQNGERCVAALARVERTDFLSPMCIGEVAHVSAEITYTSKHSVEVQVNVMSENILTGAKKLTNKATLWYVPLSLKNVDKVLEVPPVVYSRQEQEEEGRKRYEAQKLERMETKWRNGDIVQPVLNPEPNTVSYSQSSLIHLVGPSDCTLHGFVHGGVTMKLMDEVAGIVAARHCKTNIVTASVDAINFHDKIRKGCVITISGRMTFTSNKSMEIEVLVDADPVVDSSQKRYRAASAFFTYVSLSQEGRSLPVPQLVPETEDEKKRFEEGKGRYLQMKAKRQGHAEPQP

SEQ ID NO: 5627 - protein, 747 aa, Homo Sapiens
MSQVKSSYSYDAPSDFINFSSLDDEGDTQNIDSWFEEKANLENKLLGKNGTGGLFQGKTPLRKANLQQAIVTPLKPVDNTYYKEAEKENLVEQSIPSNACSSLEVEAAISRKTPAQPQRRSLRLSAQKDLEQKEKHHVKMKAKRCATPVIIDEILPSKKMKVSNNKKKPEEEGSAHQDTAEKNASSPEKAKGRHTVPCMPPAKQKFLKSTEEQELEKSMKMQQEVVEMRKKNEEFKKLALAGIGQPVKKSVSQVTKSVDFHFRTDERIKQHPKNQEEYKEVNFTSELRKHPSSPARVTKGCTIVKPFNLSQGKKRTFDETVSTYVPLAQQVEDFHKRTPNRYHLRSKKDDINLLPSKSSVTKICRDPQTPVLQTKHRARAVTCKSTAELEAEELEKLQQYKFKARELDPRILEGGPILPKKPPVKPPTEPIGFDLEIEKRIQERESKKKTEDEHFEFHSRPCPTKILEDVVGVPEKKVLPITVPKSPAFALKNRIRMPTKEDEEEDEPVVIKAQPVPHYGVPFKPQIPEARTVEICPFSFDSRDKERQLQKEKKIKELQKGEVPKFKALPLPHFDTINLPEKKVKNVTQIEPFCLETDRRGALKAQTWKHQLEEELRQQKEAACFKARPNTVISQEPFVPKKEKKSVAEGLSGSLVQEPFQLATEKRAKERQELEKRMAEVEAQKAQQLEEARLQEEEQKKEELARLRRELVHKANPIRKYQGLEIKSSDQPLTVPVSPKFSTRFHC

SEQ ID NO: 5628 - protein, 902 aa, Homo Sapiens
MKIAVIGQSLFGQEVYCHLRKEGHEVVGVFTVPDKDGKADPLGLEAEKDGVPVFKYSRWRAKGQALPDVVAKYQALGAELNVLPFCSQFIPMEIISAPRHGSIIYHPSLLPRHRGASAINWTLIHGDKKGGFSIFWADDGLDTGDLLLQKECEVLPDDTVSTLYNRFLFPEGIKGMVQAVRLIAEGKAPRLPQPEEGATYEGIQKKETAKINWDQPAEAIHNWIRGNDKVPGAWTEACEQKLTFFNSTLNTSGLVPEGDALPIPGAHRPGVVTKAGLILFGNDDKMLLVKNIQLEDGKMILASNFFKGAASSVLELTEAELVTAEAVRSVWQRILPKVLEVEDSTDFFKSGAASVDVVRLVEEVKELCDGLELENEDVYMASTFGDFIQLLVRKLRGDDEEGECSIDYVEMAVNKRTVRMPHQLFIGGEFVDAEGAKTSETINPTDGSVICQVSLAQVTDVDKAVAAAKDAFENGRWGKISARDRGRLMYRLADLMEQHQEELATIEALDAGAVYTLALKTHVGMSIQTFRYFAGWCDKIQGSTIPINQARPNRNLTLTRKEPVGVCGIIIPWNYPLMMLSWKTAACLAAGNTVVIKPAQVTPLTALKFAELTLKAGIPKGVVNVLPGSGSLVGQRLSDHPDVRKIGFTGSTEVGKHIMKSCAISNVKKVSLELGGKSPLIIFADCDLNKAVQMGMSSVFFNKGENCIAAGRLFVEDSIHDEFVRRVVEEVRKMKVGNPLDRDTDHGPQNHHAHLVKLMEYCQHGVKEGATLVCGGNQVPRPGFFFEPTVFTDVEDHMFIAKEESFGPVMIISRFADGDLDAVLSRANATEFGLASGVFTRDINKALYVSDKLQAGTVFVNTYNKTDVAAPFGGFKQSGFGKDLGEAALNEYLRVKTVTFEY

SEQ ID NO: 5629 - protein, 447 aa, Homo Sapiens
MELLKLNRSVQGTGPGPGASLCRPGAPLLNSSSVGNLSCEPPRIRGAGTRELELAIRITLYAVIFLMSVGGNMLIIVVLGLSRRLRTVTNAFLLSLAVSDLLLAVACMPFTLLPNLMGTFIFGTVICKAVSYLMGVSVSVSTLSLVAIALERYSAICRPLQARVWQTRSHAARVIVATWLLSGLLMVPYPVYTVVQPVGPRVLQCVHRWPSARVRQTWSVLLLLLLFFIPGVVMAVAYGLISRELYLGLRFDGDSDSDSQSRVRNQGGLPGAVHQNGRCRPETGAVGEDSDGCYVQLPRSRPALELTALTAPGPGSGSRPTQAKLLAKKRVVRMLLVIVVLFFLCWLPVYSANTWRAFDGPGAHRALSGAPISFIHLLSYASACVNPLVYCFMHRRFRQACLETCARCCPRPPRARPRALPDEDPPTPSIASLSRLSYTTISTLGPG

SEQ ID NO: 5630 - protein, 261 aa, Homo Sapiens
MLRVLCLLRPWRPLRARGCASDGAAGGSEIQVRALAGPDQGITEILMNRPSARNALGNVFVSELLETLAQLREDRQVRVLLFRSGVKGAFCAGADLKEREQMSEAEVGVFVQRLRGLMNDIASSAVMGLIETTRGLLPGAGGTQRLPRCLGVALAKELIFTGRRLSGTEAHVLGLVNHAVAQNEEGDAAYQRARALAQEILPQAPIAVRLGKVAINRGTEVDIASGMAIEGMCYAQNIPTRDRLEGMAAFREKRTPKFVGK

SEQ ID NO: 5631 - protein, 681 aa, Homo Sapiens
MGSPVHRVSLGDTWSRQMHPDIESERYMQSFDVERLTNILDGGAQNTALRRKVESIIHSYPEFSCKDNYFMTQNERYKAAMRRAFHIRLIARRLGWLEDGRELGYAYRALSGDVALNIHRVFVRALRSLGSEEQIAKWDPLCKNIQIIATYAQTELGHGTYLQGLETEATYDAATQEFVIHSPTLTATKWWPGDLGRSATHALVQAQLICSGARRGMHAFIVPIRSLQDHTPLPGIIIGDIGPKMDFDQTDNGFLQLNHVRVPRENMLSRFAQVLPDGTYVKLGTAQSNYLPMVVVRVELLSGEILPILQKACVIAMRYSVIRRQSRLRPSDPEAKVLDYQTQQQKLFPQLAISYAFHFLAVSLLEFFQHSYTAILNQDFSFLPELHALSTGMKAMMSEFCTQGAEMCRRACGGHGYSKLSGLPSLVTKLSASCTYEGENTVLYLQVARFLVKSYLQTQMSPGSTPQRSLSPSVAYLTAPDLARCPAQRAADFLCPELYTTAWAHVAVRLIKDSVQHLQTLTQSGADQHEAWNQTTVIHLQAAKVHCYYVTVKGFTEALEKLENEPAIQQVLKRLCDLHAIHGILTNSGDFLHDAFLSGAQVDMARTAYLDLLRLIRKDAILLTDAFDFTDQCLNSALGCYDGNVYERLFQWAQKSPTNTQENPAYEEYIRPLLQSWRSKL

SEQ ID NO: 5632 - protein, 427 aa, Homo Sapiens
MGGDLVLGLGALRRRKRLLEQEKSLAGWALVLAGTGIGLMVLHAEMLWFGGCSWALYLFLVKCTISISTFLLLCLIVAFHAKEVQLFMTDNGLRDWRVALTGRQAAQIVLELVVCGLHPAPVRGPPCVQDLGAPLTSPQPWPGFLGQGEALLSLAMLLRLYLVPRAVLLRSGVLLNASYRSIGALNQVRFRHWFVAKLYMNTHPGRLLLGLTLGLWLTTAWVLSVAERQAVNATGHLSDTLWLIPITFLTIGYGDVVPGTMWGKIVCLCTGVMGVCCTALLVAVVARKLEFNKAEKHVHNFMMDIQYTKEMKESAARVLQEAWMFYKHTRRKESHAARRHQRKLLAAINAFRQVRLKHRKLREQVNSMVDISKMHMILYDLQQNLSSSHRALEKQIDTLAGKLDALTELLSTALGPRQLPEPSQQSK

SEQ ID NO: 5633 - protein, 144 aa, Homo Sapiens
MKWDLHGSLQHGHCSAVLSLLGSTSAMGCWVCWTTSMGLTPCSSRPRPTRDMSSCWASPRSLRASQTPQRGWSERQPKCHPGCPSAMGCRHGFLIAPNNLPPSATRPNDGTTRVEGRSASRKSRAKDEAFFKLLPLMSLNGIRS

SEQ ID NO: 5634 - protein, 674 aa, Homo Sapiens
MAAFSVGTAMNASSYSAEMTEPKSVCVSVDEVVSSNMEATETDLLNGHLKKVDNNLTEAQRFSSLPRRAAVNIEFRDLSYSVPEGPWWRKKGYKTLLKGISGKFNSGELVAIMGPSGAGKSTLMNILAGYRETGMKGAVLINGLPRDLRCFRKVSCYIMQDDMLLPHLTVQEAMMVSAHLKLQEKDEGRREMVKEILTALGLLSCANTRTGSLSGGQRKRLAIALELVNNPPVMFFDEPTSGLDSASCFQVVSLMKGLAQGGRSIICTIHQPSAKLFELFDQLYVLSQGQCVYRGKVCNLVPYLRDLGLNCPTYHNPADFVMEVASGEYGDQNSRLVRAVREGMCDSDHKRDLGGDAEVNPFLWHRPSEEVKQTKRLKGLRKDSSSMEGCHSFSASCLTQFCILFKRTFLSIMRDSVLTHLRITSHIGIGLLIGLLYLGIGNETKKVLSNSGFLFFSMLFLMFAALMPTVLTFPLEMGVFLREHLNYWYSLKAYYLAKTMADVPFQIMFPVAYCSIVYWMTSQPSDAVRFVLFAALGTMTSLVAQSLGLLIGAASTSLQVATFVGPVTAIPVLLFSGFFVSFDTIPTYLQWMSYISYVRYGFEGVILSIYGLDREDLHCDIDETCHFQKSEAILRELDVENAKLYLDFIVLGIFFISLRLIAYLVLRYKIRAER

SEQ ID NO: 5635 - protein, 386 aa, Homo Sapiens
MEDCLAHLGEKVSQELKEPLHKALQMLLSQPVTYQAFRECTLETTVHASGWNKILVPLVLLRQMLLELTRLGQEPLSALLQFGVTYLEDYSAEYIIQQGGWGTVFSLESEEEEYPGITAEDSNDIYILPSDNSGQVSPPESPTVTTSWQSESLPVSLSASQSWHTESLPVSLGPESWQQIAMDPEEVKSLDSNGAGEKSENNSSNSDIVHVEKEEVPEGMEEAAVASVVLPARELQEALPEAPAPLLPHITATSLLGTREPDTEVITVEKSSPATSLFVELDEEEVKAATTEPTEVEEVVPALEPTETLLSEKEINAREESLVEELSPASEKKPVPPSEGKSRLSPAGEMKPMPLSEGKSILLFGGAAAVAILAVAIGVALALRKK

SEQ ID NO: 5636 - protein, 552 aa, Homo Sapiens
SWLTATSDSLVQAILLPQPPEWGLQATANTGVQEPFVMEAREPGRPTPTYHLVPNTSQSQVEEDVSSPPQRSSETMQLKKEISLLNGVSLVVGNMIGSGIFVSPKGVLVHTASYGMSLIVWAIGGLFSVVGALCYAELGTTITKSGASYAYILEAFGGFIAFIRLWVSLLVVEPTGQAIIAITFANYIIQPSFPSCDPPYLACRLLAAACICLLTFVNCAYVKWGTRVQDTFTYAKVVALIAIIVMGLVKLCQGHSEHFQDAFEGSSWDMGNLSLALYSALFSYSGWDTLNFVTEEIKNPERNLPLAIGISMPIVTLIYILTNVAYYTVLNISDVLSSDAVAVTFADQTFGMFSWTIPIAVALSCFGGLNASIFASSRLFFVGSREGHLPDLLSMIHIERFTPIPALLFNCTMALIYLIVEDVFQLINYFSFSYWFFVGLSVVGQLYLRWKEPKRPRPLKLSVFFPIVFCICSVFLVIVPLFTDTINSLIGIGIALSGVPFYFMGVYLPESRRPLFIRNVLAAITRGTQQLCFCVLTELDVAEEKKDERKTD

SEQ ID NO: 5637 - protein, 187 aa, Homo Sapiens
MNALHVLEMSANPLDNNGIEPGAFEGVTVFHIRIAEAKLTSVPKGLPPTLLELHLDYNKISTVELEDFKRYKELQRLGLGNNKITDIENGSLANIPRVREIHLENNKLKKIPSGLPELKYLQIIFLHSNSIARVGVNDFCPTVPKMKKSLYSAISLFNNPVKYWEMQPATFRCVLSRMSVQLGNFGM

SEQ ID NO: 5638 - protein, 416 aa, Homo Sapiens
MPRQLSAAAALFASLAVILHDGSQMRAKAFPETRDYSQPTAAATVQDIKKPVQQPAKQAPHQTLAARFMDGHITFQTAATVKIPTTTPATTKNTATTSPITYTLVTTQATPNNSHTAPPVTEVTVGPSLAPYSLPPTITPPAHTTGTSSSTVSHTTGNTTQPSNQTTLPATLSIALHKSTTGQKPVQPTHAPGTTAAAHNTTRTAAPASTVPGPTLAPQPSSVKTGIYQVLNGSRLCIKAEMGIQLIVQDKESVFSPRRYFNIDPNATQASGNCGTRKSNLLLNFQGGFVNLTFTKDEESYYISEVGAYLTVSDPETIYQGIKHAVVMFQTAVGHSFKCVSEQSLQLSAHLQVKTTDVQLQAFDFEDDHFGNVDECSSDYTIVLPVIGAIVVGLCLMGMGVYKIRLRCQSSGYQRI

SEQ ID NO: 5639 - protein, 414 aa, Homo Sapiens [sequence omitted]

SEQ ID NO: 5640 - protein, 98 aa, Homo Sapiens
MKVSAVLLCLLLMTAAFNPQGLAQPDALNVPSTCCFTFSSKKISLQRLKSYVITTSRCPQKAVIFRTKLGKEICADPKEKWVQNYMKHLGRKAHTLKT

SEQ ID NO: 5641 - protein, 354 aa, Homo Sapiens
MYREWVVVNVFMMLYVQLVQGSSNEHGPVKRSSQSTLERSEQQIRAASSLEELLRITHSEDWKLWRCRLRLKSFTSMDSRSASHRSTRFAATFYDIETLKVIDEEWQRTQCSPRETCVEVASELGKSTNTFFKPPCVNVFRCGGCCNEESLICMNTSTSYISKQLFEISVPLTSVPELVPVKVANHTGCKCLPTAPRHPYSIIRRSIQIPEEDRCSHSKKLCPIDMLWDSNKCKCVLQEENPLAGTEDHSHLQEPALCGPHMMFDEDRCECVCKTPCPKDLIQHPKNCSCFECKESLETCCQKHKLFHPDTCSCEDRCPFHTRPCASGKTACAKHCRFPKEKRAAQGPHSRKNP

SEQ ID NO: 5642 - protein, 620 aa, Homo Sapiens
MLSAIYTVLAGLLFLPLLVNLCCPYFFQDIGYFLKVAAVGRRVRSYGQRRPARTILRAFLEKARQTPHKPFLLFRDETLTYAQVDRRSNQVARALHDHLGLRQGDCVALLMGNEPAYVWLWLGLVKLGCAMACLNYNIRAKSLLHCFQCCGAKVLLVSPELQAAVEEILPSLKKDDVSIYYVSRTSNTDGIDSFLDKVDEVSTEPIPESWRSEVTFSTPALYIYTSGTTGLPKAAMITHQRIWYGTGLTFVSGLKADDVIYITLPFYHSAALLIGIHGCIVAGATLALRTKFSASQFWDDCRKYNVTVIQYIGELLRYLCNSPQKPNDRDHKVRLALGNGLRGDVWRQFVKRFGDICIYEFYAATEGNIGFMNYARKVGAVGRVNYLQKKIITYDLIKYDVEKDEPVRDENGYCVRVPKGEVGLLVCKITQLTPFNGYAGAKAQTEKKKLRDVFKKGDLYFNSGDLLMVDHENFIYFHDRVGDTFRWKGENVATTEVADTVGLVDFVQEVNVYGVHVPDHEGRIGMASIKMKENHEFDGKKLFQHIADYLPSYARPRFLRIQDTIEITGTFKHRKMTLVEEGFNPAVIKDALYFLDDTAKMYVPMTEDIYNAISAKTLKL

SEQ ID NO: 5643 - protein, 197 aa, Homo Sapiens
MLFLGSLGAWGTTSISTGSIFSLKTLRSQHGGQVGLKVSRPRAPRMGAATPTPRAPWVARWLMGSQAFTATPSARPPPPIKHNMDIGTWDNKGPVPKAPVPQQAPSPQAAPQPQQVAQPLPAQPPALAQPQYQSPQQPPQTRWVAPRNRNAAFGQSGGAGSDSNSPGNVQPNSAPSVESHPVLEKLKAAHSYNPKEF

SEQ ID NO: 5644 - protein, 475 aa, Homo Sapiens
MAAKLQPNIPKAKSLDGVTNDRTASQGQWGRAWEVDWFSLASVIFLLLFAPFIVYYFIMACDQYSCALTGPVVDIVTGHARLSDIWAKTPPITRKAAQLYTLWVTFQVLLYTSLPDFCHKFLPGYVGGIQEGAVTPAGVVNKYQINGLQAWLLTHLLWFANAHLLSWFSPTIIFDNWIPLLWCANILGYAVSTFAMVKGYFFPTSARDCKFTGNFFYNYMMGIEFNPRIGKWFDFKLFFNGRPGIVAWTLINLSFAAKQRELHSHVTNAMVLVNVLQAIYVIDFFWNETWYLKTIDICHDHFGWYLGWGDCVWLPYLYTLQGLYLVYHPVQLSTPHAVGVLLLGLVGYYIFRVANHQKDLFRRTDGRCLIWGRKPKVIECSYTSADGQRHHSKLLVSGFWGVARHFNYVGDLMGSLAYCLACGGGHLLPYFYIIYMAILLTHRCLRDEHRCASKYGRDWERYTAAVPYRLLPGIF

SEQ ID NO: 5645 - protein, 405 aa, Homo Sapiens
MQELNNEINMQQTVIYQASQALNCCVDEEHGKGSLEEAEAERLLLIATGKRTLLIDELNKLKNEGPQRKNKASPQSEFMPSKGSVTLSEIRLPLKADFVCSTVQKPDAANYYYLIILKAGAENMVATPLASTSNSLNGDALTFTTTFTLQDVSNDFEINIEVYSLVQKKDPSGLDKKKKTSKSKAITPKRLLTSITTKSNIHSSVMASPGGLSAVRTSNFALVGSYTLSLSSVGNTKFVLDKVPFLSSLEGHIYLKIKCQVNSSVEERGFLTIFEDVSGFGAWHRRWCVLSGNCISYWTYPDDEKRKNPIGRINLANCTSRQIEPANREFCARRNTFELITVRPQREDDRETLVSQCRDTLCVTKNWLSADTKEERDLWMQKLNQVLVDIRLWQPDACYKPIGKP

SEQ ID NO: 5646 - protein, 873 aa, Homo Sapiens
MDVGEEPLEKAARARTAKDPNTYKVLSLVLSVCVLTTILGCIFGLKPSCAKEVKSCKGRCFERTFGNCRCDAACVELGNCCLDYQETCIEPEHIWTCNKFRCGEKRLTRSLCACSDDCKDKGDCCINYSSVCQGEKSWVEEPCESINEPQCPAGFETPPTLLFSLDGFRAEYLHTWGGLLPVISKLKKCGTYTKNMRPVYPTKTFPNHYSIVTGLYPESHGIIDNKMYDPKMNASFSLKSKEKFNPEWYKGEPIWVTAKYQGLKSGTFFWPGSDVEINGIFPDIYKMYNGSVPFEERILAVLQWLQLPKDERPHFYTLYLEEPDSSGHSYGPVSSEVIKALQRVDGMVGMLMDGLKELNLHRCLNLILISDHGMEQGSCKKYIYLNKYLGDVKNIKVIYGPAARLRPSDVPDKYYSFNYEGIARNLSCREPNQHFKPYLKHFLPKRLHFAKSDRIEPLTFYLDPQWQLALNPSERKYCGSGFHGSDNVFSNMQALFVGYGPGFKHGIEADTFENIEVYNLMCDLLNLTPAPNNGTHGSLNHLLKNPVYTPKHPKEVHPLVQCPFTRNPRDNLGCSCNPSILPIEDFQTQFNLTVAEEKIIKHETLPYGRPRVLQKENTICLLSQHQFMSGYSQDILMPLWTSYTVDRNDSFSTEDFSNCLYQDFRIPLSPVHKCSFYKNNTKVSYGFLSPPQLNKNSSGIYSEALLTTNIVPMYQSFQVIWRYFHDTLLRKYAEERNGVNVVSGPVFDFDYDGRCDSLENLRQKRRVIRNQEILIPTHFFIVLTSCKDTSQTPLHCENLDTLAFILPHRTDNSESCVHGKHDSSWVEELLMLHRARITDVEHITGLSFYQQRKEPVSDILKLKTHLPTFSQED

SEQ ID NO: 5647 - protein, 1333 aa, Homo Sapiens [sequence omitted]

SEQ ID NO: 5648 - protein, 300 aa, Homo Sapiens
MKFLLDILLLLPLLIVCSLESFVKLFIPKRRKSVTGEIVLITGAGHGIGRLTAYEFAKLKSKLVLWDINKHGLEETAAKCKGLGAKVHTFVVDCSNREDIYSSAKKVKAEIGDVSILVNNAGVVYTSDLFATQDPQIEKTFEVNVLAHFWTTKAFLPAMTKNNHGHIVTVASAAGHVSVPFLLAYCSSKFAAVGFHKTLTDELAALQITGVKTTCLCPNFVNTGFIKNPSTSLGPTLEPEEVVNRLMHGILTEQKMIFIPSSIAFLTTLERILPERFLAVLKRKISVKFDAVIGYKMKAQ

SEQ ID NO: 5649 - protein, 103 aa, Homo Sapiens
MLVEAIMLVTATAPGRQQVRDQGAYLILRELHSWEPEPDVRTACEKLIQVLIGDEPERGMENLLEVQVPEDVEQQLQQLDCREQEQLERELAPEPWVERATPT

SEQ ID NO: 5650 - protein, 318 aa, Homo Sapiens
MPNNSTALSLANVTYITMEIFIGLCAIVGNVLVICVVKLNPSLQTTTFYFIVSLALADIAVGVLVMPLAIVVSLGITIHFYSCLFMTCLLLIFTHASIMSLLAIAVDRYLRVKLTVRYKRVTTHRRIWLALGLCWLVSFLVGLTPMFGWNMKLTSEYHRNVTFLSCQFVSVMRMDYMVYFSFLTWIFIPLVVMCAIYLDIFYIIRNKLSLNLSNSKETGAFYGREFKTAKSLFLVLFLFALSWLPLSIINCIIYFNGEVPQLVLYMGILLSHANSMMNPIVYAYKIKKFKETYLLILKACVVCHPSDSLDTSIEKNSE

SEQ ID NO: 5651 - protein, 132 aa, Homo Sapiens
MDARPKLDLGFKEGQTIKLCIGNITNKKGGASKPRTARGGGLSLLPPPPGGKVTIPPPSSVAISNHVTPPPIPKSNHGGSDADILLDLDSPAPVTTPAPTPVSVSNDLWGDFSTASSSVPNQAPQPSNWVQF

SEQ ID NO: 5652 - protein, 439 aa, Homo Sapiens
AAAGPSPSPGAGTMVLSVPVIALGATLGTATSILALCGVTCLCRHMHPKKGLLPRDQDPDLEKAKPSLLGSAQQFNVKKSTEPVQPRALLKFPDIYGPRPAVTAPEVINYADYSLRSTEEPTAPASPQPPNDSRLKRQVTEELFILPQNGVVEDVCVMETWNPEKAASWNQAPKLHYCLDYDCQKAELFVTRLEAVTSNHDGGCDCYVQGSVANRTGSVEAQTALKKRQLHTTWEEGLVLPLAEEELPTATLTLTLRTCDRFSRHSVAGELRLGLDGTSVPLGAAQWGELKTSAKEPSAGAGEVLLSISYLPAANRLLVVLIKAKNLHSNQSKELLGKDVSVKVTLKHQARKLKKKQTKRAKHKINPVWNEMIMFELPDDLLQASSVELEVLGQDDSGQSCALGHCSLGLHTSGSERSHWEEMLKNPRRQIAMWHQLHL

SEQ ID NO: 5653 - protein, 907 aa, Homo Sapiens
MSGQTLTDRIAAAQYSVTGSAVARAVCKATTHEVMGPKKKHLDYLIQATNETNVNIPQMADTLFERATNSSWVVVFKALVTTHHLMVHGNERFIQYLASRNTLFNLSNFLDKSGSHGYDMSTFIRRYSRYLNEKAFSYRQMAFDFARVKKGADGVMRTMAPEKLLKSMPILQGQIDALLEFDVHPNELTNGVINAAFMLLFKDLIKLFACYNDGVINLLEKFFEMKKGQCKDALEIYKRFLTRMTRVSEFLKVAEQVGIDKGDIPDLTQAPSSLMETLEQHLNTLEGKKPGNNEGSGAPSPLSKSSPATTVTSPNSTPAKTIDTSPPVDLFATASAAVPVSTSKPSSDLLDLQPDFSSGGAAAAAAPAPPPPAGGATAWGDLLGEDSLAALSSVPSEAQISDPFAPEPTPPTTTAEIATASASASTTTTVTAVTAEVDLFGDAFAASPGEAPAASEGAAAPATPTPVAAALDACSGNDPFAPSEGSAEAAPELDLFAMKPPETSVPVVTPTASTAPPVPATAPSPAPAVAAAAAATTAATAAATTTTTTSAATATTAPPALDIFGDLFESTPEVAAAPKPDAAPSIDLFSTDAFSSPPQGASPVPESSLTADLLSVDAFAAPSPATTASPAKVDSSGVIDLFGDAFGSSASEPQPASQAASSSSASADLLAGFGGSFMAPSPSPVTPAQNNLLQPNFEAAFGTTPSTSSSSSFDPSVFDGLGDLLMPTMAPAGQPAPVSMVPPSPAMAASKALGSDLDSSLASLVGNLGISGTTTKKGDLQWNAGEKKLTGGANWQPKVAPATWSAGVPPSAPLQGAVPPTSSVPPVAGAPSVGQPGAGFGMPPAGTGMPMMPQQPVMFAQPMMRPPFGAAAVPGTQLSPSPTPASQSPKKPPAKDPLADLNIKDFL

SEQ ID NO: 5654 - protein, 137 aa, Homo Sapiens
MVPDMAGYPHIRYISSGLDGTSFRGPFRGNFEELIHLEERLGNVNRGASQGTIERCTYPHKYKKRKLHCKQDGEEGTEEDTEEKCTICLSILEEGEDVRRLPCMHLFHQVCVDQWLITNKKCPICRVDIEAQLPSES

SEQ ID NO: 5655 - protein, 612 aa, Homo Sapiens [sequence omitted]

SEQ ID NO: 5656 - protein, 761 aa, Homo Sapiens
GGFAVQHQGPCAFYCDLPVGTLSPSRSSMERRSESPCLRDSPDRRSGSPDVKGPPPVKVARLEQNGSPMGARGRPNGAVAKAVGGLMIPVFCVVEQLDGSLEYDNREEHAEFVLVRKDVLFSQLVETALLALGYSHSSAAQAQGIIKLGRWNPLPLSYVTDAPDATVADMLQDVYHVVTLKIQLQSCSKLEDLPAEQWNHATVRNALKELLKEMNQSTLAKECPLSQSMISSIVNSTYYANVSATKCQEFGRWYKKYKKIKVERVERENLSDYCVLGQRPMHLPNMNQLASLGKTNEQSPHSQIHHSTPIRNQVPALQPIMSPGLLSPQLSPQLVRQQIAMAHLINQQIAVSRLLAHQHPQAINQQFLNHPPIPRAVKPEPTNSSVEVSPDIYQQVRDELKRASVSQAVFARVAFNRTQGLLSEILRKEEDPRTASQSLLVNLRAMQNFLNLPEVERDRIYQDERERSMNPNVSMVSSASSSPSSSRTPQAKTSTPTTDLPIKVDGANINITAAIYDEIQQEMKRAKVSQALFAKVAANKSQGWLCELLRWKENPSPENRTLWENLCTIRRFLNLPQHERDVIYEEESRHHHSERMQHVVQLPPEPVQVLHRQQSQPAKESSPPREEAPPPPPPTEDSCAKKPRSRTKISLEALGILQSFIHDVGLYPDQEAIHTLSAQLDLPKHTIIKFFQNQRYHVKHHGKLKEHLGSAVDVAEYKDEELLTESEENDSEEGSEEMYKVEAEEENADKSKAAPAEIDQR

SEQ ID NO: 5657 - protein, 409 aa, Homo Sapiens
TCKSQRLMLQVGLIYPASPGCYHLLPYTVRAMEKLVRVIDQEMQAIGGQKVNMPSLSPAELWQATNRWDLMGKELLRLRDRHGKEYCLGPTHEEAITALIASQKKLSYKQLPFLLYQVTRKFRDEPRPRFGLLRGREFYMKDMYTFDSSPEAAQQTYSLVCDAYCSLFNKLGLPFVKVQADVGTIGGTVSHEFQLPVDIGEDRLAICPRCSFSANMETLDLSQMNCPACQGPLTKTKGIEVGHTFYLGTKYSSIFNAQFTNVCGKPTLAEMGCYGLGVTRILAAAIEVLSTEDCVRWPSLLAPYQACLIPPKKGSKEQAASELIGQLYDHITEAVPQLHGEVLLDDRTHLTIGNRLKDANKFGYPFVIIAGKRALEDPAHFEVWCQNTGEVAFLTKDGVMDLLTPVQTV

SEQ ID NO: 5658 - protein, 497 aa, Homo Sapiens [sequence omitted]

SEQ ID NO: 5659 - protein, 419 aa, Homo Sapiens
MAGFGAMEKFLVEYKSAVEKKLAEYKCNTNTAIELKLVRFPEDLENDIRTFFPEYTHQLFGDDETAFGYKGLKILLYYIAGSLSTMFRVEYASKVDENFDCVEADDVEGKIRQIIPPGFCTNTNDFLSLLEKEVDFKPFGTLLHTYSVLSPTGGENFTFQIYKADMTCRGFREYHERLQTFLMWFIETASFIDVDDERWHYFLVFEKYNKDGATLFATVGYMTVYNYYVYPDKTRPRVSQMLILTPFQGQGHGAQLLETVHRYYTEFPTVLDITAEDPSKSYVKLRDFVLVKLCQDLPCFSREKLMQGFNEDMAIEAQQKFKINKQHARRVYEILRLLVTDMSDAEQYRSYRLDIKRRLISPYKKKQRDLAKMRKCLRPEELTNQMNQIEISMQHEQLEESFQELVEDYRRVIERLAQE

SEQ ID NO: 5660 - protein, 736 aa, Homo Sapiens
MATEGMILTNHDHQIRVGVLTVSDSCFRNLAEDRSGINLKDLVQDPSLLGGTISAYKIVPDEIEEIKETLIDWCDEKELNLILTTGGTGFAPRDVTPEATKEVIEREAPGMALAMLMGSLNVTPLGMLSRPVCGIRGKTLIINLPGSKKGSQECFQFILPALPHAIDLLRDAIVKVKEVHDELEDLPSPPPPLSPPPTTSPHKQTEDKGVQCEEEEEEKKDSGVASTEDSSSSHITAAAIAAKIPDSIISRGVQVLPRDTASLSTTPSESPRAQATSRLSTASCPTPKVQSRCSSKENILRASHSAVDITKVARRHRMSPFPLTSMDKAFITVLEMTPVLGTEIINYRDGMGRVLAQDVYAKDNLPPFPASVKDGYAVRAADGPGDRFIIGESQAGEQPTQTVMPGQVMRVTTGAPIPCGADAVVQVEDTELIRESDDGTEELEVRILVQARPGQDIRPIGHDIKRGECVLAKGTHMGPSEIGLLATVGVTEVEVNKFPVVAVMSTGNELLNPEDDLLPGKIRDSNRSTLLATIQEHGYPTINLGIVGDNPDDLLNALNEGISRADVIITSGGVSMGEKDYLKQVLDIDLHAQIHFGRVFMKPGLPTTFATLDIDGVRKIIFALPGNPVSAVVTCNLFVVPALRKMQGILDPRPTIIKARLSCDVKLDPRPEYHRCILTWHHQEPLPWAQSTGNQMSSRLMSMRSANGLLMLPPKTEQYVELHKGEVVDVMVIGRL

SEQ ID NO: 5661 - protein, 779 aa, Homo Sapiens
MASFVTEVLAHSGRLEKEDLGTRISRLTRRVEEIKGEVCNMISKKYSEFLPSMQSAQGLITQVDKLSEDIDLLKSRIESEVRRDLHVSTGEFTDLKQQLERDSVVLSLLKQLQEFSTAIEEYNCALTEKKYVTGAQRLEEAQKCLKLLKSRKCFDLKILKSLSMELTIQKQNILYHLGEEWQKLIVWKFPPSKDTSSLESYLQTELHLYTEQSHKEEKTPMPPISSVLLAFSVLGELHSKLKSFGQMLLKYILRPLASCPSLHAVIESQPNIVIIRFESIMTNLEYPSPSEVFTKIRLVLEVLQKQLLDLPLDTDLENEKTSTVPLAEMLGDMIWEDLSECLIKNCLVYSIPTNSSKLQQYEEIIQSTEEFENALKEMRFLKGDTTDLLKYARNINSHFANKKCQDVIVAARNLMTSEIHNTVKIIPDSKINVPELPTPDEDNKLEVQKVSNTQYHEVMNLEPENTLDQHSFSLPTCRISESVKKLMELAYQTLLEATTSSDQCAVQLFYSVRNIFHLFHDVVPTYHKENLQKLPQLAAIHHNNCMYIAHHLLTLGHQFRLRLAPILCDGTATFVDLVPGFRRLGTECFLAQMRAQKGELLERLSSARNFSNMDDEENYSAASKAVRQVLHQLKRLGIVWQDVLPVNIYCKAMGTLLNTAISEVIGKITALEDISTEDGDRLYSLCKTVMDEGPQVFAPLSEESKNKKYQEEVPVYVPKWMPFKELMMMLQASLQEIGDRWADGKGPLAAAFSSSEVKALIRALFQNTERRAAALAKIK

SEQ ID NO: 5662 - protein, 496 aa, Homo Sapiens
MFAKATRNFLREVDADGDLIAVSNLNDSDKLQLLSLVTKKKRFWCWQRPKYQFLSLTLGDVLIEDQFPSPVVVESDFVKYEGKFANHVSGTLETALGKVKLNLGGSSRVESQSSFGTLRKQEVDLQQLIRDSAERTINLRNPVLQQVLEGRNEVLCVLTQKITTMQKCVISEHMQVEEKCGGIVGIQTKTVQVSATEDGNVTKDSNVVLEIPAATTIAYGVIELYVKLDGQFEFCLLRGKQGGFENKKRIDSVYLDPLVFREFAFIDMPDAAHGISSQDGPLSVLKQATLLLERNFHPFAELPEPQQTALSDIFQAVLFDDELLMVLEPVCDDLVSGLSPTVAVLGELKPRQQQDLVAFLQLVGCSLQGGCPGPEDAGSKQLFMTAYFLVSALAEMPDSAAALLGTCCKLQIIPTLCHLLRALSDDGVSDLEDPTLTPLKDTERFGIVQRLFASADISLERLKSSVKAVILKDSKVFPLLLCITLNGLCALGREHS

SEQ ID NO: 5663 - protein, 346 aa, Homo Sapiens
MEEKYLPELMAEKDSLDPSFTHALRLVNQEIEKFQKGEGKDEEKYIDVVINKNMKLGQKVLIPVKQFPKFNFVGKLLGPRGNSLKRLQEETLTKMSILGKGSMRDKAKEEELRKSGEAKYFHLNDDLHVLIEVFAPPAEAYARMGHALEEIKKFLIPDYNDEIRQAQLQELTYLNGGSENADVPVVRGKPTLRTRGVPAPAITRGRGGVTARPVGVVVPRGTPTPRGVLSTRGPVSRGRGLLTPRARGVPPTGYRPPPPPPTQETYGEYDYDDGYGTAYDEQSYDSYDNSYSTPAQSGADYYDYGHGLSEETYDSYGQEEWTNSRHKAPSARTAKGVYRDQPYGRY

SEQ ID NO: 5664 - protein, 1175 aa, Homo Sapiens
LWSVMENNLKTCPKEDGDFVSDKIKFKIEEEDDDGIPPDSLERMDFKSEQEDMKQTDSGGERAGLGGTGCSCKPPGKYLSAESEDDYGALFSQYSSTLYDVAMEAVTQSLLSSRNMSSRKKSPAWKHFFISPRDSTKAICMYCVKEFSRGKNEKDLSTSCLMRHVRRAHPTVLIQENGSVSAVSSFPSPSLLLPPQPADAGDLSTILSPIKLVQKVASKIPSPDRITEESVSVVSSEEISSDMSVSEKCGREEALVGSSPHLPALHYDEPAENLAEKSLPLPKSTSGSRRRSAVWKHFYLSPLDNSKAVCIHCMNEFSRGKNGKDLGTSCLIRHMWRAHRAIVLQENGGTGIPPLYSTPPTLLPSLLPPEGELSSVSSSPVKPVRESPSASSSPDRLTEDLQSHLNPGDGLMEDVAAFSSSDDVGEASASSPEKQQADGLSPRLFESGAIFQQNKKVMKRLKSEVWHHFSLAPMDSLKAECRYCGCAISRGKKGDVGTSCLMRHLYRRHPEVVGSQKGFLGASLANSPYATLASAESSSSKLTDLPTVVTKNNQVMFPVNSKKTSKLWNHFSICSADSTKVVCLHCGRTISRGKKPTNLGTSCLLRHLQRFHSNVLKTEVSETARPSSPDTRVPRGTELSGASSFDDTNEKFYDSHPVAKKITSLIAEMIALDLQPYSFVDNVGFNRLLEYLKPQYSLPAPSYFSRTAIPGMYDNVKQIIMSHLKEAESGVIHFTSGIWMSNQTREYLTLTAHWVSFESPARPRCDDHHCSALLDVSQVDCDYSGNSIQKQLECWWEAWVTSTGLQVGITVTDNASIGKTLNEGEHSSVQCFSHTVNLIVSEAIKSQRMVQNLLSLARKICERVHRSPKAKEKLAELQREYALPQHHLIQDVPSKWSTSFHMLERLIEQKRAINEMSVECNFRELISCDQWEVMQSVCRALKPFEAASREMSTQMSTLSQVIPMVHILNRKVEMLFEETMGIDTMLRSLKEAMVSRLSATLHDPRYVFATLLDPRYKASLFTEEEAEQYKQDLIRELELMNSTSEDVAASHRCDAGSPSKDSAAEENLWSLVAKVKKKDPREKLPEAMVLAYLEEEVLEHSCDPLTYWNLKKASWPGLSALAVRFLGCPPSIVPSEKLFNTPTENGSLGQSRLMMEHFEKLIFLKVNLPLIYFQY

SEQ ID NO: 5665 - protein, 283 aa, Homo Sapiens
IHASSSLNGRSTEEVKPIDENLGQTGKSAVCIHQDINDDHVEDVTGIQHLTSDSDSEVYCDSMEQFGQEESLDSFTSNNGPFQYYLGGHSSQPMENSGFREDIQVPPGNGNIGNMQVVAVEGKGEVKHGGEDGRNNSGAPHREKRGGETDEFSNVRRGRGHRMQHLSEGTKGRQVGSGGDGERWGSDRGSRGSLNEQIALVLMRLQEDMQNVLQRLQKLETLTALQAKSSTSTLQTAPQPTSQRPSWWPFEMSPGVLTFAIIWPFIAQWLVYLYYQRRRRKLN

SEQ ID NO: 5666 - protein, 479 aa, Homo Sapiens
MAWNTNLRWRLPLTCLLLQVIMVILFGVFVRYDFEADAHWWSERTHKNLSDMENEFYYRYPSFQDVHVMVFVGFGFLMTFLQRYGFSAVGFNFLLAAFGIQWALLMQGWFHFLQDRYIVVGVENLINADFCVASVCVAFGAVLGKVSPIQLLIMTFFQVTLFAVNEFILLNLLKVKDAGGSMTIHTFGAYFGLTVTRILYRRNLEQSKERQNSVYQSDLFAMIGTLFLWMYWPSFNSAISYHGDSQHRAAINTYCSLAACVLTSVAISSALHKKGKLDMVHIQNATLAGGVAVGTAAEMMLMPYGALIIGFVCGIISTLGFVYLTPFLESRLHIQDTCGINNLHGIPGIIGGIVGAVTAASASLEVYGKEGLVHSFDFQGFNGDWTARTQGKFQIYGLLVTLAMALMGGIIVGLILRLPFWGQPSDENCFEDAVYWEMPEGNSTVYIPEDPTFKPSGPSVPSVPMVSPLPMASSVPLVP

SEQ ID NO: 5667 - protein, 1122 aa, Homo Sapiens
GRQHPRCRGAAPRSLRDPRRLRGKTRRRRRRMSLQSAQYLRQAEVLKADMTDSKLGPAEVWTSRQALQDLYQKMLVTDLEYALDKKVEQDLWNHAFKNQITTLQGQAKNRANPNRSEVQANLSLFLEAASGFYTQLLQELCTVFNVDLPCRVKSSQLGIISNKQTHTSAIVKPQSSSCSYICQHCLVHLGDIARYRNQTSQAESYYRHAAQLVPSNGQPYNQLAILASSKGDHLTTIFYYCRSIAVKFPFPAASTNLQKALSKALESRDEVKTKWGVSDFIKAFIKFHGHVYLSKSLEKLSPLREKLEEQFKRLLFQKAFNSQQLVHVTVINLFQLHHLRDFSNETEQHTYSQDEQLCWTQLLALFMSFLGILCKCPLQNESQEESYNAYPLPAVKVSMDWLRLRPRVFQEAVVDERQYIWPWLISLLNSFHPHEEDLSSISATPLPEEFELQGFLALRPSFRNLDFSKGHQGITGDKEGQQRRIRQQRLISIGKWIADNQPRLIQCENEVGKLLFITEIPELILEDPSEAKENLILQETSVIESLAADGSPGLKSVLSTSRNLSNNCDTGEKPVVTFKENIKTREVNRDQGRSFPPKEVKSQTELRKTPVSEARKTPVTQTPTQASNSQFIPIHHPGAFPPLPSRPGFPPPTYVIPPPVAFSMGSGYTFPAGVSVPGTFLQPTAHSPAGNQVQAGKQSHIPYSQQRPSGPGPMNQGPQQSQPPSQQPLTSLPAQPTAQSTSQLQVQALTQQQQSPTKAVPALGKSPPHHSGFQQYQQADASKQLWNPPQVQGPLGKIMPVKQPYYLQTQDPIKLFEPSLQPPVMQQQPLEKKMKPFPMEPYNHNPSEVKVPEFYWDSSYSMADNRSVMAQQANIDRRGKRSPGIFRPEQDPVPRMPFEKSLLEKPSELMSHSSSFLSLTGFSLNQERYPNNSMFNEVYGKNLTSSSKAELSPSMAPQETSLYSLFEGTPWSPSLPASSDHSTPASQSPHSSNPSSLPSSPPTHNHNSVPFSNFGPIGTPDNRDRRTADRWKTDKPAMGGFGIDYLSATSSSESSWHQASTPSGTWTGHGPSMEDSSAVLMESLKSIWSSSMMHPGPSALEQLLMQQKQKQQRGQGTMNPPH

SEQ ID NO: 5668 - protein, 464 aa, Homo Sapiens
MGSPAHRPALLLLLPPLLLLLLLRVPPSRSFPGSGDSPLEDDEVGYSHPRYKDTPWCSPIKVKYGDVYCRAPQGGYYKTALGTRCDIRCQKGYELHGSSLLICQSNKRWSDKVICKQKRCPTLAMPANGGFKCVDGAYFNSRCEYYCSPGYTLKGERTVTCMDNKAWSGRPASCVDMEPPRIKCPSVKERIAEPNKLTVRVSWETPEGRDTADGILTDVILKGLPPGSNFPEGDHKIQYTVYDRAENKGTCKFRVKVRVKRCGKLNAPENGYMKCSSDGDNYGATCEFSCIGGYELQGSPARVCQSNLAWSGTEPTCAAMNVNVGVRTAAALLDQFYEKRRLLIVSTPTARNLLYRLQLGMLQQAQCGLDLRHITVVELVGVFPTLIGRIGAKIMPPALALQLRLLLRIPLYSFSMVLVDKHGMDKERYVSLVMPVALFNLIDTFPLRKEEMVLQAEMSQTCNT

SEQ ID NO: 5669 - protein, 279 aa, Homo Sapiens [sequence omitted]

SEQ ID NO: 5670 - protein, 744 aa, Homo Sapiens
EMRHKQVKENRLRREKELEYQRIEKTLKKSAFLEAQCLVQEEKKRKALEAKKEEEEIQREMVKLRREIIERRRTVKAAWKIEKKRQEENSQNSSEKVMFQSTHILPDEEKMVKERKRKLKEVLIQTFKENQQCQKRYFAAWHKLILDHRIKLGKAGTLSDWKIQLKVLRAWRDYTRFQKLERETQALENDLREENRKQQLATEYNRKQVLRHCFTEWQHWHGAELLKRELALTKEETRKKMDALLQAASLGKLSANGLSGISLPEEATAMVGPPVKNGQETAVPPLWEKPPLGSSGCMLSPPLGRTTTGNLQGSLQNVSLSAPGNKQHKTLGAEPSQQPGSNETLRTTSQKAEPLCLGHFHNRHVFQQQLIEKQKKKLQEQQKTILELKKNLQLAEAQWAAEHALAVTEAQSHLLSKPREEEPRTCQMLVNSPVASPGTEGRSDSRNSLSGLRRKPKQLMTPHPILKAMEERAIQRAECRRILAEKKKKQEEEKLAQLKAQEEERQKREAEEKEAQLERKREEKRLKKMKELEKQKRIKRNQQLEAIAKEHYERVLLRKKGLEPWKRLRMQSKQNIQVAEEHYSLFLQRKYMLTWFQRSQESLARKMAQADQFYSQILLKRVIQSWLQYVIDLQEEVRKFCVHFLQKKIFRAWFNMVREVKIDSQGKHEIAAEHSDRRILWITLRTWKKFVKFMKEERVKEERRQQLRRKVVEILPDFQVPGRYHELYQQSDTWSLSKTSLVNE

SEQ ID NO: 5671 - protein, 517 aa, Homo Sapiens
MELEELGIREECGVFGCIASGEWPTQLDVPHVITLGLVGLQHRGQESAGIVTSDGSSVPTFKSHKGMGLVNHVFTEDNLKKLYVSNLGIGHTRYATTGKCELENCQPFVVETLHGKIAVAHNGELVNAARLRKKLLRHGIGLSTSSDSEMITQLLAYTPPQEQDDTPDWVARIKNLMKEAPTAYSLLIMHRDVIYAVRDPYGNRPLCIGRLIPVSDINDKEKKTSETEGWVVSSESCSFLSIGARYYREVLPGEIVEISRHNVQTLDIISRSEGNPVAFCIFEYVYFARPDSMFEDQMVYTVRYRCGQQLAIEAPVDADLVSTVPESATPAALAYAGKCGLPYVEVLCKNRYVGRTFIQPNMRLRQLGVAKKFGVLSDNFKGKRIVLVDDSIVRGNTISPIIKLLKESGAKEVHIRVASPPIKYPCFMGINIPTKEELIANKPEFDHLAEYLGANSVVYLSVEGLVSSVQEGIKFKKQKEKKHDIMIQENGNGLECFEKSGHCTACLTGKYPVELEW

SEQ ID NO: 5672 - protein, 1314 aa, Homo Sapiens
MALRPGAGSGGGGAAGAGAGSAGGGGFMFPVAGGIRPPQAGLMPMQQQGFPMVSVMQPNMQGIMGMNYSSQMSQGPIAMQAGIPMGPMPAAGMPYLGQAPFLGMRPPGPQYTPDMQKQFAEEQQKRFEQQQKLLEEERKRRQFEEQKQKLRLLSSVKPKTGEKSRDDALEAIKGNLDGFSRDAKMHPTPASHPKKPGPSLEEKFLVSCDISTSGQEQIKLNTSEVGHKALGPGSSKKYPSLMASNGVAVDGCVSGTTTAEAENTSDQNLSIEESGVGVFPSQDPAQPRMPPWIYNESLVPDAYKKILETTMTPTGIDTAKLYPILMSSGLPRETLGQIWALANRTTPGKLTKEELYTVLAMIAVTQRGVPAMSPDALNQFPAAPIPTLSGFSMTLPTPVSQPTVIPSGPAGSMPLSLGQPVMGINLVGPVGGAAAQASSGFIPTYPANQVVKPEEDDFQDFQDASKSGSLDDSFSDFQELPASSKTSNSQHGNSAPSLLMPLPGTKALPSMDKYAVFKGIAADKSSENTVPPGDPGDKYSAFRELEQTAENKPLGESFAEFRSAGTDDGFTDFKTADSVSPLEPPTKDKTFPPSFPSGTIQQKQQTQVKNPLNLADLDMFSSVNCSSEKPLSFSAVFSTSKSVSTPQSTGSAATMTALAATKTSSLADDFGEFSLFGEYSGLAPVGEQDDFADFMAFSNSSISSEQKPDDKYDALKEEASPVPLTSNVGSTVKGGQNSTAASTKYDVFRQLSLEGSGLGVEDLKDNTPSGKSDDDFADFHSSKFSSINSDKSLGEKAVAFRHTKEDSASVKSLDLPSIGGSSVGKEDSEDALSVQFDMKLADVGGDLKHVMSDSSLDLPTVSGQHPPAADIEDLKYAAFGSYSSNFAVSTLTSYDWSDRDDATQGRKLSPFVLSAGSGSPSATSILQKKETSFGSSENITMTSLSKVTTFVSEDALPETTFPALASFKDTIPQTSEQKEYENRDYKDFTKQDLPTAERSQEATCPSPASSGASQETPNECSDDFGEFQSEKPKISKFDFLVATSQSKMKSSEEMIKSELATFDLSVQGSHKRSLSLGDKEISRSSPSPALEQPFRDRSNTLNEKPALPVIRDKYKDLTGEVEENERYAYEWQRCLGSALNVIKKANDTLNGISSSSVCTEVIQSAQGMEYLLGVVEVYRVTKRVELGIKATAVCSEKLQQLLKDIDKVWNNLIGFMSLATLTPDENSLDFSSCMLRPGIKNAQELACGVCLLNVDSRSRKEEKPAEEHPKKAFNSETDSFKLAYGGHQYHASCANFWINCVEPKPPGLVLPDLL

SEQ ID NO: 5673 - protein, 752 aa, Homo Sapiens
MVVDEQQRLTAQLTLQRQKIQELTTNAKETHTKLALAEARVQEEEQKATRLEKELQTQTTKFHQDQDTIMAKLTNEDSQNRQLQQKLAALSRQIDELEETNRSLRKAEEELQDIKEKISKGEYGNAGIMAEVEELIKMEEQCRDLNKRLERETLQSKDFKLEVEKLSKRIMALEKLEDAFNKSKQECYSLKCNLEKERMTTKQLSQELESLKVRIKELEAIESRLEKTEFTLKEDLTKLKTLTVMFVDERKTMSEKLKKTEDKLQAASSQLQVEQNKVTTVTEKLIEETKRALKSKTDVEEKMYSVTKERDDLKNKLKAEEEKGNDLLSRVNMLKNRLQSLEAIEKDFLKNKLNQDSGKSTTALHQENNKIKELSQEVERLKLKLKDMKAIEDDLMKTEDEYETLERRYANERDKAQFLSKELEHVKMELAKYKLAEKTETSHEQWLFKRLQEEEAKSGHLSREVDALKEKIHEYMATEDLICHLQGDHSVCKKKLNQQENRNRDLGREIENLTKELERYRHFSKSLRPSLNGRRISDPQVFSKEVQTEAVDNEPPDYKSLIPLERAVINGQLYEESENQDEDPNDEGSVLSFKCSQSTPCPVNRKLWIPWMKSKEGHLQNGKMQTKPNANFVQPGDLVLSHTPGQPLHIKVTPDHVQNTATLEITSPTTESPHSYTSTAVIPNCGTPKQRITILQNASITPVKSKTSTEDLMNLEQGMSPITMATFARAQTPESCGSLTPERTMSLFRFWL

SEQ ID NO: 5674 - protein, 282 aa, Homo Sapiens
MGNTSSERAALERHGGHKTPRRDSSGGTKDGDRPKILMDSPEDADLFHSEEIKAPEKEEFLAWQHDLEVNDKAPAQARPTVFRWTGGGKEVYLSGSFNNWSKLPLTRSHNNFVAILDLPEGEHQYKFFVDGQWTHDPSEPIVTSQLGTVNNIIQVKKTDFEVFDALMVDSQKCSDVSGMNTVILYHMRAELSSSPPGPYHQEPYVCKPEERFRAPPILPPHLLQVILNKDTGISCDPALLPEPNHVMLNHLYALSIKDGVMVLSATHRYKKKYVTTLLYKPI

SEQ ID NO: 5675 - protein, 1203 aa, Homo Sapiens
MDLRDFYLLAALIACLRLDSAIAQELIYTIREELPENVPIGNIPKDLNISHINAATGTSASLVYRLVSKAGDAPLVKVSSSTGEIFTTSNRIDREKLCAGASYAEENECFFELEVVILPNDFFRLIKIKIIVKDTNDNAPMFPSPVINISIPENTLINSRFPIPSATDPDTGFNGVQHYELLNGQSVFGLDIVETPEGEKWPQLIVQQNLDREQKDTYVMKIKVEDGGTPQKSSTAILQVTVSDVNDNRPVFKEGQVEVHIPENAPVGTSVIQLHATDADIGSNAEIRYIFGAQVAPATKRLFALNNTTGLITVQRSLDREETAIHKVTVLASDGSSTPARATVTINVTDVNDNPPNIDLRYIISPINGTVYLSEKDPVNTKIALITVSDKDTDVNGKVICFIEREVPFHLKAVYDNQYLLETSSLLDYEGTKEFSFKIVASDSGKPSLNQTALVRVKLEDENDNPPIFNQPVIELSVSENNRRGLYLTTISATDEDSGKNADIVYQLGPNASFFDLDRKTGVLTASRVFDREEQERFIFTVTARDNGTPPLQSQAAVIVTVLDENDNSPKFTHNHFQFFVSENLPKYSTVGVITVTDADAGENKAVTLSILNDNDNFVLDPYSGVIKSNVSFDREQQSSYTFDVKATDGGQPPRSSTAKVTINVMDVNDNSPVVISPPSNTSFKLVPLSAIPGSVVAEVFAVDVDTGMNAELKYTIVSGNNKGLFRIDPVTGNITLEEKPAPTDVGLHRLVVNISDLGYPKSLHTLVLVFLYVNDTAGNASYIYDLIRRTMETPLDRNIGDSSQPYQNEDYLTIMIAIIAGAMVVIVVIFVTVLVRCRHASRFKAAQRSKQGAEWMSPNQENKQNKKKKRKKRKSPKSSLLNFVTIEESKPDDAVHEPINGTISLPAELEEQSIGRFDWGPAPPTTFKPNSPDLAKHYKSASPQPAFHLKPDTPVSVKKHHVIQELPLDNTFVGGCDTLSKRSSTSSDHFSASECSSQGGFKTKGPLHTRQSQRRVTFHLPDGSQESCSDSGLGDHEPVGSGTLISHPLPLVQPQDEFYDQASPDKRTEADGNSDPNSDGPLGPRGLAEATEMCTQECLVLGHSDNCWMPPGLGPYQHPKSPLSTFAPQKEWVKKDKLVNGHTLTRAWKEDSNRNQFNDRKQYGSNEGHFNNGSHMTDIPLANLKSYKQAGGATESPKEHQL

SEQ ID NO: 5676 - protein, 558 aa, Homo Sapiens [sequence omitted]

SEQ ID NO: 5677 - protein, 181 aa, Homo Sapiens
MGLPLARLAAVCLALSLAGGSELQTEGRTRNHGHNVCSTWGNFHYKTFDGDVFRFPGPCDYNFASDCRGSYKEFAVHLKRGPGQAEAPAGVESILLTIKDDTIYLTRHLAVLNGAVVSTPHYSPGLLIEKSDAYTKVYSRAGLTLMWNREDALMLELDTKFRNHTCGLCGDYNGLQSYSEF

SEQ ID NO: 5678 - protein, 328 aa, Homo Sapiens
MEWDNGTGQALGLPPTTCVYRENFKQLLLPPVYSAVLAAGLPLNICVITQICTSRRALTRTAVYTLNLALADLLYACSLPLLIYNYAQGDHWPFGDFACRLVRFLFYANLHGSILFLTCISFQRYLGICHPLAPWHKRGGRRAAWLVCVAVWLAVTTQCLPTAIFAATGIQRNRTVCYDLSPPALATHYMPYGMALTVIGFLLPFAALLACYCLLACRLCRQDGPAEPVAQERRGKAARMAVVVAAAFAISFLPFHITKTAYLAVRSTPGVPCTVLEAFAAAYKGTRPFASANSVLDPILFYFTQKKFRRRPHELLQKLTAKWQRQGR

SEQ ID NO: 5679 - protein, 203 aa, Homo Sapiens
METSASSSQPQDNSQVHRETEDVDYGETDFHKQDGKAGLFSQEQYERNKSSSSSFSSSSSSSSSSSSSSSGPGHGEPDVLKDELQLYGDAPGEVVPSGESGLRRRGSDPASGEVEASQLRRLNIKKDDEFFHFVLLCFAIGALLVCYHYYADWFMSLGVGLLTFASLETVGIYFGLVYRIHSVLQGFIPLFQKFRLTGFRKTD

SEQ ID NO: 5680 - protein, 721 aa, Homo Sapiens
GGNFIGAAKMGMRIKLQSTNHPNNLLKELNKCRLSETMCDVTIVVGSRSFPAHKAVLACAAGYFQNLFLNTGLDAARTYVVDFITPANFEKVLSFVYTSELFTDLINVGVIYEVAERLGMEDLLQACHSTFPDLESTARAKPLTSTSESHSGTLSCPSAEPAHPLGELRGGGDYLGADRNYVLPSDAGGSYKEEEKNVASDANHSLHLPQPPPPPPKTEDHDTPAPFTSIPSMMTQPLLGTVSTGIQTSTSSCQPYKVQSNGDFSKNSFLTPDNAVDITTGTNSCLSNSEHSKDPGFGQMDELQLEDLGDDDLQFEDPAEDIGTTEEVIELSDDSEDELAFGENDNRENKAMPCQVCKKVLEPNIQLIRQHARDHVDLLTGNCKVCETHFQDRNSRVTHVLSHIGIFLFSCDMCETKFFTQWQLTLHRRDGIFENNIIVHPNDPLPGKLGLFSGAASPELKCAACGKVLAKDFHVVRGHILDHLNLKGQACSVCDQRHLNLCSLMWHTLSHLGISVFSCSVCANSFVDWHLLEKHMAVHQSLEDALFHCRLCSQSFKSEAAYRYHVSQHKCNSGLDARPGFGLQHPALQKRKLPAEEFLGEELALQGQPGNSKYSCKVCGKRFAHTSEFNYHRRIHTGEKPYQCKVCHKFFRGRSTIKCHLKTHSGALMYRCTVCGHYSSTLNLMSKHVGVHKGSLPPDFTIEQTFMYIIHSKEADKNPDS

SEQ ID NO: 5681 - protein, 3433 aa, Homo Sapiens
MAKYGEHEASPDNGQNEFSDIIKSRSDEHNDVQKKTFTKWINARFSKSGKPPINDMFTDLKDGRKLLDLLEGLTGTSLPKERGSTRVHALNNVNRVLQVLHQNNVELVNIGGTDIVDGNHKLTLGLLWSIILHWQVKDVMKDVMSDLQQTNSEKILLSWVRQTTRPYSQVNVLNFTTSWTDGLAFNAVLHRHKPDLFSWDKVVKMSPIERLEHAFSKAQTYLGIEKLLDPEDVAVRLPDKKSIIMYLTSLFEVLPQQVTIDAIREVETLPRKYKKECEEEAINIQSTAPEEEHESPRAETPSTVTEVDMDLDSYQIALEEVLTWLLSAEDTFQEQDDISDDVEEVKDQFATHEAFMMELTAHQSSVGSVLQAGNQLITQGTLSDEEEFEIQEQMTLLNARWEALRVESMDRQSRLHDVLMELQKKQLQQLSAWLTLTEERIQKMETCPLDDDVKSLQKLLEEHKSLQSDLEAEQVKVNSLTHMVVIVDENSGESATAILEDQLQKLGERWTAVCRWTEERWNRLQEINILWQELLEEQCLLKAWLTEKEEALNKVQTSNFKDQKELSVSVRRLAILKEDMEMKRQTLDQLSEIGQDVGQLLDNSKASKKINSDSEELTQRWDSLVQRLEDSSNQVTQAVAKLGMSQIPQKDLLETVRVREQAITKKSKQELPPPPPPKKRQIHVDIEAKKKFDAISAELLNWILKWKTAIQTTEIKEYMKMQDTSEMKKKLKALEKEQRERIPRADELNQTGQILVEQMGKEGLPTEEIKNVLEKVSSEWKNVSQHLEDLERKIQLQEDINAYFKQLDELEKVIKTKEEWVKHTSISESSRQSLPSLKDSCQRELTNLLGLHPKIEMARASCSALMSQPSAPDFVQRGFDSFLGRYQAVQEAVEDRQQHLENELKGQPGHAYLETLKTLKDVLNDSENKAQVSLNVLNDLAKVEKALQEKKTLDEILENQKPALHKLAEETKALEKNVHPDVEKLYKQEFDDVQGKWNKLKVLVSKDLHLLEEIALTLRAFEADSTVIEKWMDGVKDFLMKQQAAQGDDAGLQRQLDQCSAFVNEIETIESSLKNMKEIETNLRSGPVAGIKTWVQTRLGDYQTQLEKLSKEIATQKSRLSESQEKAANLKKDLAEMQEWMTQAEEEYLERDFEYKSPEELESAVEEMKRAKEDVLQKEVRVKILKDNIKLLAAKVPSGGQELTSELNVVLENYQLLCNRIRGKCHTLEEVWSCWIELLHYLDLETTWLNTLEERMKSTEVLPEKTDAVNEALESLESVLRHPADNRTQIRELGQTLIDGGILDDIISEKLEAFNSRYEDLSHLAESKQISLEKQLQVLRETDQMLQVLQESLGELDKQLTTYLTDRIDAFQVPQEAQKIQAEISAHELTLEELRRNMRSQPLTSPESRTARGGSQMDVLQRKLREVSTKFQLFQKPANFEQRMLDCKRVLDGVKAELHVLDVKDVDPDVIQTHLDKCMKLYKTLSEVKLEVETVIKTGRHIVQKQQTDNPKGMDEQLTSLKVLYNDLGAQVTEGKQDLERASQLARKMKKEAASLSEWLSATETELVQKSTSEGLLGDLDTEISWAKNVLKDLEKRKADLNTITESSAALQNLIEGSEPILEERLCVLNAGWSRVRTWTEDWCNTLMNHQNQLEIFDGNVAHISTWLYQAEALLDEIEKKPTSKQEEIVKRLVSELDDANLQVENVRDQALILMNARGSSSRELVEPKLAELNRNFEKVSQHIKSAKLLIAQEPLYQCLVTTETFETGVPFSDLEKLENDIENMLKFVEKHLESSDEDEKMDEESAQIEEVLQRGEEMLHQPMEDNKKEKIRLQLLLLHTRYNKIKAIPIQQRKMGQLASGIRSSLLPTDYLVEINKILLCMDDVELSLNVPELNTAIYEDFSFQEDSLKNIKDQLDKLGEQIAVIHEKQPDVILEASGPEAIQIRDTLTQLNAKWDRINRMYSDRKGCFDRAMEEWRQFHCDLNDLTQWITEAEELLVDTCAPGGSLDLEKARIHQQELEVGISSHQPSFAALNRTGDGIVQKLSQADGSFLKEKLAGLNQRWDAIVAEVKDRQPRLKGESKQVMKYRHQLDEIICWLTKAEHAMQKRSTTELGENLQELRDLTQEMEVHAEKLKWLNRTELEMLSDKSLSLPERDKISESLRTVNMTWNKICREVPTTLKECIQEPSSVSQTRIAAHPNVQKVVLVSSASDIPVQSHRTSEISIPADLDKTITELADWLVLIDQMLKSNIVTVGDVEEINKTVSRMKITKADLEQRHPQLDYVFTLAQNLKNKASSSDMRTAITEKLERVKNQWDGTQHGVELRQQQLEDMIIDSLQWDDHREETEELMRKYEARLYILQQARRDPLTKQISDNQILLQELGPGDGIVMAFDNVLQKLLEEYGSDDTRNVKETTEYLKTSWINLKQSIADRQNALEAEWRTVQASRRDLENFLKWIQEAETTVNVLVDASHRENALQDSILARELKQQMQDIQAEIDAHNDIFKSIDGNRQKMVKALGNSEEATMLQHRLDDMNQRWNDLKAKSASIRAHLEASAEKWNRLLMSLEELIKWLNMKDEELKKQMPIGGDVPALQLQYDHCKALRRELKEKEYSVLNAVDQARVFLADQPIEAPEEPRRNLQSKTELTPEERAQKIAKAMRKQSSEVKEKWESLNAVTSNWQKQVDKALEKLRDLQGAMDDLDADMKEAESVRNGWKPVGDLLIDSLQDHIEKIMAFREEIAPINFKVKTVNDLSSQLSPLDLHPSLKMSRQLDDLNMRWKLLQVSVDDRLKQLQEAHRDFGPSSQHFLSTSVQLPWQRSISHNKVPYYINHQTQTTCWDHPKMTELFQSLADLNNVRFSAYRTAIKIRRLQKALCLDLLELSTTNEIFKQHKLNQNDQLLSVPDVINCLTTTYDGLEQMHKDLVNVPLCVDMCLNWLLNVYDTGRTGKIRVQSLKIGLMSLSKGLLEEKYRYLFKEVAGPTEMCDQRQLGLLLHDAIQIPRQLGEVAAFGGSNIEPSVRSCFQQNNNKPEISVKEFIDWMHLEPQSMVWLPVLHRVAAAETAKHQAKCNICKECPIVGFRYRSLKHFNYDVCQSCFFSGRTAKGHKLHYPMVEYCIPTTSGEDVRDFTKVLKNKFRSKKYFAKHPRLGYLPVQTVLEGDNLETPITLISMWPEHYDPSQSPQLFHDDTHSRIEQYATRLAQMERTNGSFLTDSSSTTGSVEDEHALIQQYCQTLGGESPVSQPQSPAQILKSVEREERGELERIIADLEEEQRNLQVEYEQLKDQHLRRGLPVGSPPESIISPHHTSEDSELIAEAKLLRQHKGRLEARMQILEDHNKQLESQLHRLRQLLEQPESDSRINGVSPWASPQHSALSYSLDPDASGPQFHQAAGEDLLAPPHDTSTDLTEVMEQIHSTFPSCCPNVPSRPQAM

SEQ ID NO: 5682 - protein, 847 aa, Homo Sapiens
EYARLVMEAQPEWLRAEVKRLSHELAETTREKIQAAEYGLAVLEEKHQLKLQFEELEVDYEAIRSEMEQLKEAFGQAHTNHKKVAADGESREESLIQESASKEQYYVRKVLELQTELKQLRNVLTNTQSENERLASVAQELKEINQNVEIQRGRLRDDIKEYKFREARLLQDYSELEEENISLQKQVSVLRQNQVEFEGLKHEIKRLEEETEYLNSQLEDAIRLKEISERQLEEALETLKTEREQKNSLRKELSHYMSINDSFYTSHLHVSLDGLKFSDDAAEPNNDAEALVNGFEHGGLAKLPLDNKTSTPKKEGLAPPSPSLVSDLLSELNISEIQKLKQQLMQMEREKAGLLATLQDTQKQLEHTRGSLSEQQEKVTRLTENLSALRRLQASKERQTALDNEKDRDSHEDGDYYEVDINGPEILACKYHVAVAEAGELREQLKALRSTHEAREAQHAEEKGRYEAEGQALTEKVSLLEKASRQDRELLARLEKELKKVSDVAGETQGSLSVAQDELVTFSEELANLYHHVCMCNNETPNRVMLDYYREGQGGAGRTSPGGRTSPEARGRRSPILLPKGLLAPEAGRADGGTGDSSPSPGSSLPSPLSDPRREPMNIYNLIAIIRDQIKHLQAAVDRTTELSRQRIASQELGPAVDKDKEALMEEILKLKSLLSTKREQITTLRTVLKANKQTAEVALANLKSKYENEKAMVTETMMKLRNELKALKEDAATFSSLRAMFATRCDEYITQLDEMQRQLAAAEDEKKTLNSLLRMAIQQKLALTQRLELLELDHEQTRRGRAKAAPKTKPATPSVSHTCACASDRAEGTGLANQVFCSEKHSIYCD

SEQ ID NO: 5683 - protein, 164 aa, Homo Sapiens
MASPHQEPKPGDLIEIFRLGYEHWALYIGDGYVIHLAPPSEYPGAGSSSVFSVLSNSAEVKRGRLEDVVGGCCYRVNNSLDHEYQPRPVEVIISSAKEMVGQKMKYSIVSRNCEHFVAQLRYGKSRCKQVEKAKVEVGVATALGILVVAGCSFAIRRYQKKATA

SEQ ID NO: 5684 - protein, 1010 aa, Homo Sapiens
MSQLRLLPSRLGVQAARLLAAHDVPVFGWRSRSSGPPATFPSSKGGGGSSYMEEMYFAWLENPQSVHKSWDSFFREASEEAFSGSAQPRPPSVVHEGRSAVSSRTKTSKLVEDHLAVQSLIRAYQIRGHHVAQLDPLGILDADLDSFVPSDLITTIDKLAFYDLQEADLDKEFQLPTTTFIGGSENTLSLREIIRRLENTYCQHIGLEFMFINDVEQCQWIRQKFETPGVMQFSSEEKRTLLARLVRSMRFEDFLARKWSSEKRFGLEGCEVMIPALKTIIDKSSEMGIENVILGMPHRGRLNVLANVIRKDLEQIFCRFDPKLEAADEGSGDVKYHLGMYHERINRVTNRNITLSLVANPSHLEAVDPVVQGKTKAEQFYRGDAQGKKVMSILVHGDAAFAGQGVVYETFHLSDLPSYTTNGTVHVVVNNQIGFTTDPRMARSSPYPTDVARVVNAPIFHVNADDPEAVIYVCSVAAEWRNTFNKDVVVDLVCYRRRGHNEMDEPMFTQPLMYKQIHRQVPVLKKYADKLIAEGTVTLQEFEEEIAKYDRICEEAYGRSKDKKILHIKHWLDSPWPGFFNVDGEPKSMTCPATGIPEDMLTHIGSVASSVPLEDFKIHTGLSRILRGRADMTKNRTVDWALAEYMAFGSLLKEGIHVRLSGQDVERGTFSHRHHVLHDQEVDRRTCVPMNHLWPDQAPYTVCNSSLSEYGVLGFELGYAMASPNALVLWEAQFGDFHNTAQCIIDQFISTGQAKWVRHNGIVLLLPHGMEGMGPEHSSARPERFLQMSNDDSDAYPAFTKDFEVSQLYDCNWIVVNCSTPANYFHVLRRQILLPFRKPLIIFTPKSLLRHPEAKSSFDQMVSGTSFQRVIPEDGAAARAPEQVQRLIFCTGKVYYDLVKERSSQDLEEKVAITRLEQISPFPFDLIKQEAEKYPGAELAWCQEEHKNMGYYDYISPRFMTILRRARPIWYVGRDPAAAPATGNRNTHLVSLKKFLDTAFNLQAFEGKTF

SEQ ID NO: 5685 - protein, 322 aa, Homo Sapiens
MARCFSLVLLLTSIWTTRLLVQGSLRAEELSIQVSCRIMGITLVSKKANQQLNFTEAKEACRLLGLSLAGKDQVETALKASFETCSYGWVGDGFVVISRISPNPKCGKNGVGVLIWKVPVSRQFAAYCYNSSDTWTNSCIPEIITTKDPIFNTQTATQTTEFIVSDSTYSVASPYSTIPAPTTTPPAPASTSIPRRKKLICVTEVFMETSTMSTETEPFVENKAAFKNEAAGFGGVPTALLVLALLFFGAAAGLGFCYVKRYVKAFPFTNKNQQKEMIETKVVKEEKANDSNPNEESKKTDKNPEESKSPSKTTVRCLEAEV

SEQ ID NO: 5686 - protein, 783 aa, Homo Sapiens
MSGGHQLQLAALWPWLLMATLQAGFGRTGLVLAAAVESERSAEQKAVIRVIPLKMDPTGKLNLTLEGVFAGVAEITPAEGKLMQSHPLYLCNASDDDNLEPGFISIVKLESPRRAPRPCLSLASKARMAGERGASAVLFDITEDRAAAEQLQQPLGLTWPVVLIWGNDAEKLMEFVYKNQKAHVRIELKEPPAWPDYDVWILMTVVGTIFVIILASVLRIRCRPRHSRPDPLQQRTAWAISQLATRRYQASCRQARGEWPDSGSSCSSAPVCAICLEEFSEGQELRVISCLHEFHRNCVDPWLHQHRTCPLCVFNITEGDSFSQSLGPSRSYQEPGRRLHLIRQHPGHAHYHLPAAYLLGPSRSAVARPPRPGPFLPSQEPGMGPRHHRFPRAAHPRAPGEQQRLAGAQHPYAQGWGMSHLQSTSQHPAACPVPLRRARPPDSSGSGESYCTERSGYLADGPASDSSSGPCHGSSSDSVVNCTDISLQGVHGSSSTFCSSLSSDFDPLVYCSPKGDPQRVDMQPSVTSRPRSLDSVVPTGETQVSSHVHYHRHRHHHYKKRFQWHGRKPGPETGVPQSRPPIPRTQPQPEPPSPDQQVTGSNSAAPSGRLSNPQCPRALPEPAPGPVDASSICPSTSSLFNLQKSSLSARHPQRKRRGGPSEPTPGSRPQDATVHPACQIFPHYTPSVAYPWSPEAHPLICGPPGLDKRLLPETPGPCYSNSQPVWLCLTPRQPLEPHPPGEGPSEWSSDTAEGRPCPYPHCQVLSAQPGSEEELEELCEQAV

SEQ ID NO: 5687 - protein, 135 aa, Homo Sapiens
MPGRWRWQRDMHPARKLLSLLFLILMGTELTQVLPTNPEESWQVYSSAQDSEGRCICTVVAPQQTMCSRDARTKQLRQLLEKVQNMSQSIEVLDRRTQRDLQYVEKMENQMKGLESKFKQVEESHKQHLARQFKG

SEQ ID NO: 5688 - protein, 377 aa, Homo Sapiens [sequence omitted]

SEQ ID NO: 5689 - protein, 888 aa, Homo Sapiens
MLLECFININYIKKEEGRRFLSCLFNWNINFIKMIHGTIKNQLQGLQKSLMVYIAEIYFRAWKKASGKILEAIENDCIQDFMFHGIHLPRRSPVHSKVREVLSYFHHQKKVRQGVEEMLYRLYKPILWRGLKARNSEVRSNAALLFVEAFPIRDPNLHAIEMDSKIQKQFEELYSLLEDPYPMVRSTGILGVCKITSKYWEMMPPTILIDLLKKVTGELAFDTSSADVRCSVFKCLPMILDNKLSHPLLEQLLPALRYSLHDNSEKVRVAFVDMLLKIKAVRAAKFWKICPMEHILVRLETDSRPVSRRLVSLIFNSFLPVNQPEEVWCERCVTLVQMNHAAARRFYQYAHEHTACTNIAKLIHVIRHCLNACIQRAVREPPEDEEEEDGREKENVTVLDKTLSVNDVACMAGLLEIIVILWKSIDRSMENNKEAKLYTINKFASVLPEYLKVFKDDRCKIPLFMLMSFMPASAVPPFSCGVISTLRSREEGAVDKSYCTLLDCLCSWGQVGHILELVDNWLPTEHAQAKSNTASKGRVQIHDTRPVKPELALVYIEYLLTHPKNRECLLSAPRKKLNHLLKALETSKADLESLLQTPGGKPRGFSEAAAPRAFGLHCRLSIHLQHKFCSEGKVYLSMLEDTGFWLESKILSFIQDQEEDYLKLHRVIYQQIIQTYLTVCKDVVMVGLGDHQFQMQLLQRSLGIMQTVKGFFYVSLLLDILKEITGSSLIQKTDSDEEVAMLLDTVQKVFQKMLECIARSFRKQPEEGLRVSDVEELTPPEHLSDLPPFSRCLIGIIIKSSNVVRSFLDELKACVASNDIEGIVCLTAAVHIILVINAGKHKSSKVREVAATVHRKLKTFMEITLEEDSIERFLYESSSRTLGELLNS

SEQ ID NO: 5690 - protein, 216 aa, Homo Sapiens
MRPRSGPTRNPRLRAFAGVPTRGRTRGQSRRCAAEASAGPERDARPGAPAAGTMGAAHSASEEVRELEGKTGFSSDQIEQLHRRFKQLSGDQPTIRKENFNNVPDLELNPIRSKIVRAFFDNRNLRKGPSGLADEINFEDFLTIMSYFRPIDTTMDEEQVELSRKEKLRFLFHMYDSDSDGRITLEEYRNVKWSRSCCRETLTSRRSPLAPSPTGP

SEQ ID NO: 5691 - protein, 298 aa, Homo Sapiens
MVPQIEGNTGTVPQPTNVKVVLPAAGLSAAQPPASYPLPGSPLAAGVLPSQNSSVLSTAATSPQPASAGISQAQATVPPAVPTHTPGPAPSPSPALTHSTAQSDSTSYISAVGNTNANGTVVPPQQMGSGPCGSCGRRCSCGTNGNLQLNSYYYPNPMPGPMYRVPSFFTLPSICNGSYLNQAHQSNGNQLPFFLPQTPYANGLVHDPVMGSQANYGMQQMAGFGRFYPVYPAPNVVANTSGSGPKKNGNVSCYNCGVSGHYAQDCKQSSMEANQQGTYRLRYAPPLPPSNDTLDSAD

SEQ ID NO: 5692 - protein, 541 aa, Homo Sapiens
MGSSEVSIIPGLQKEEKAAVERRRLHVLKALKKLRIEADEAPVVAVLGSGGGLRAHIACLGVLSEMKEQGLLDAVTYLAGVSGSTWAISSLYTNDGDMEALEADLKHRFTRQEWDLAKSLQKTIQAARSENYSLTDFWAYMVISKQTRELPESHLSNMKKPVEEGTLPYPIFAAIDNDLQPSWQEARAPETWFEFTPHHAGFPALGAFVSITHFGSKFKKGRLVRTHPERDLTFLRGLWGSALGNTEVIREYIFDQLRNLTLKGLWRRAVANAKSIGHLIFARLLRLQESSQGEHPPPEDEGGEPEHTWLTEMLENWTRTSLEKQEQPHEDPERKGSLSNLMDFVKKTGICASKWEWGTTHNFLYKHGGIRDKIMSSRKHLHLVDAGLAINTPFPLVLPPTREVHLILSFDFSAGDPFETIRATTDYCRRHKIPFPQVEEAELDLWSKAPASCYILKGETGPVVMHFPLFNIDACGGDIEAWSDTYDTFKLADTYTLDVVVLLLALAKKNVRENKKKILRELMNVAGLYYPKDSARSCCLA

SEQ ID NO: 5693 - protein, 1179 aa, Homo Sapiens
MKLKELERPAVQAWSPASQYPLYLATGTSAQQLDSSFSTNGTLEIFEVDFRDPSLDLKHRGVLSALSRFHKLVWGSFGSGLLESSGVIVGGGDNGMLILYNVTHILSSGKEPVIAQKQKHTGAVRALDLNPFQGNLLASGASDSEIFIWDLNNLNVPMTLGSKSQQPPEDIKALSWNRQAQHILSSAHPSGKAVVWDLRKNEPIIKVSDHSNRMHCSGLAWHPDIATQLVLCSEDDRLPVIQLWDLRFASSPLKVLESHSRGILSVSWSQADAELLLTSAKDSQILCRNLGSSEVVYKLPTQSSWCFDVQWCPRDPSVFSAASFNGWISLYSVMGRSWEVQHMRQADKISSSFSKGQPLPPLQVPEQVAQAPLIPPLKKPPKWIRRPTGVSFAFGGKLVTFGLPSTPAHLVPQPCPRLVFISQVTTESEFLMRSAELQEALGSGNLLNYCQNKSQQALLQSEKMLWQFLKVTLEQDSRMKFLKLLGYSKDELQKKVATWLKSDVGLGESPQPKGNDLNSDRQQAFCSQASKHTTKEASASSAFFDELVPQNMTPWEIPITKDIDGLLSQALLLGELGPAVELCLKEERFADAIILAQAGGTDLLKQTQERYLAKKKTKISSLLACVVQKNWKDVVCTCSLKNWREALALLLTYSGTEKFPELCDMLGTRMEQEGSRALTSEARLCYVCSGSVERLVECWAKCHQALSPMALQDLMEKVMVLNRSLEQLRGPHGVSPGPATTYRVTQYANLLAAQGSLATAMSFLPRDCAQPPVQQLRDRLFHAQGSAVLGQQSPPFPFPRIVVGATLHSKETSSYRLGSQPSHQVPTPSPRPRVFTPQSSPAMPLAPSHPSPYQGPRTQNISDYRAPGPQAIQPLPLSPGVRPASSQPQLLGGQRVQVPNPVGFPGTWPLPGSPLPMACPGIMRPGSTSLPETPRLFPLLPLRPLGPGRMVSHTPAPPASFPVPYLPGDPGAPCSSVLPTTGILTPHPGPQDSWKEAPAPRGNLQRNKLPETFMPPAPITAPVMSLTPELQGILPSQPPVSSVSHAPPGVPGELSLQLQHLPPEKMERKELPPEHQSLKSSFEALLQRCSLSATDLKTKRKLEEAAQRLEYLYEKLCEGTLSPHVVAGLHEVARCVDAGSFEQGLAVHAQVAGCSSFSEVSSFMPILKAVLIIAHKLLV

SEQ ID NO: 5694 - protein, 718 aa, Homo Sapiens
MDELHSLDPRRQELLEARFTGVASGSTGSTGSCSVGAKATTNNESSNHSFGSLGSLSDKESETPEKKQSESSRGRKRKAENQNESSQGKSIGGRGHKISDYFEYQGGNGSSPVRGIPPAIRSPQNSHSHSTPSSSVRPNSPSPTALAFGDHPIVQPKQLSFKIIQTDLTMLKLAALESNKIQDLEKKEGRIDDLLRANCDLRRQIDEQQKLLEKYKERLNKCISMSKKLLIEKSTQEKLSSREKSMQDRLRLGHFTTVRHGASFTEQWTDGFAFQNLVKQQEWVNQQREDIERQRKLLAKRKPPTANNSQAPSTNSEPKQRKNKAVNGAENDPFVRPNLPQLLTLAEYHEQEEIFKLRLGHLKKEEAEIQAELERLERVRNLHIRELKRINNEDNSQFKDHPTLNERYLLLHLLGRGGFSEVYKAFDLYEQRYAAVKIHQLNKSWRDEKKENYHKHACREYRIHKELDHPRIVKLYDYFSLDTDTFCTVLEYCEGNDLDFYLKQHKLMSEKEARSIVMQIVNALRYLNEIKPPIIHYDLKPGNILLVDGTACGEIKITDFGLSKIMDDDSYGVDGMDLTSQGAGTYWYLPPECFVVGKEPPKISNKVDVWSVGVIFFQCLYGRKPFGHNQSQQDILQENTILKATEVQFPVKPVVSSEAKAFIRRCLAYRKEDRFDVHQLANDPYLLPHMRRSNSSGNLHMAGLTASPTPPSSSIITY

SEQ ID NO: 5695 - protein, 359 aa, Homo Sapiens
MQAAALPEEIRWLLEDAEEFLAEGLRNENLSAVARDHRDHILRGFQQIKARYYWDFQPQGGDIGQDSSDDNHSGTLGLSLTSDAPFLSDYQDEGMEDIVKGAQELDNVIKQGYLEKKSKDHSFFGSEWQKRWCVVSRGLFYYYANEKSKQPKGTFLIKGYSVRMAPHLRRDSKKESCFELTSQDRRSYEFTATSPAEARDWVDQISFLLKDLSSLTIPYEEDEEEEEKEETYDDIDGFDSPSCGSQCRPTILPGSVGIKEPTEEKEEEDIYEVLPDEEHDLEEDESGTRRKGVDYASYYQGLWDCHGDQPDELSFQRGDLIRILSKEYNMYGWWVGELNSLVGIVPKEYLTTAFEVEER

SEQ ID NO: 5696 - protein, 583 aa, Homo Sapiens
RPGPGHVRVRTPPLSPLPFRPWPLCPAARRTMGSILSRRIAGVEDIDIQANSAYRYPPKSGNYFASHFFMGGEKFDTPHPEGYLFGENMDLNFLGSRPVQFPYVTPAPHEPVKTLRSLVNIRKDSLRLVRYKDDADSPTEDGDKPRVLYSLEFTFDADARVAITIYCQASEEFLNGRAVYSPKSPSLQSETVHYKRGVSQQFSLPSFKIDFSEWKDDELNFDLDRGVFPVVIQAVVDEGDVVEVTGHAHVLLAAFEKHMDGSFSVKPLKQKQIVDRVSYLLQEIYGIENKNNQETKPSDDENSDNSNECVVCLSDLRDTLILPCRHLCLCTSCADTLRYQANNCPICRLPFRALLQIRAVRKKPGALSPVSFSPVLAQSLEHDEHSCPFKKSKPHPASLASKKPKRETNSDSVPPGYEPISLLEALNGLRAVSPAIPSAPLYEEITYSGISDGLSQASCPLAAIDHILDSSRQKGRPQSKAPDSTLRSPSSPIHEEDEEKLSEDVDAPPPLGGAELALRESSSPESFITEEVDESSSPQQGTRAASIENVLQDSSPEHCGRGPPADIYLPALGPDSCSVGIDE

SEQ ID NO: 5697 - protein, 741 aa, Homo Sapiens
SWGSVLASHERSPRRAAALGEAKRPTRKTLEHNCAHFCINIPGSYVCRCKQGYILNSDQTTCRIQDLCAMEDHNCEQLCVNVPGSFVCQCYSGYALAEDGKRCVAVDYCASENHGCEHECVNADGSYLCQCHEGFALNPDEKTCTKIDYCASSNHGCQHECVNTDDSYSCHCLKGFTLNPDKKTCRRINYCALNKPGCEHECVNMEESYYCRCHRGYTLDPNGKTCSRVDHCAQQDHGCEQLCLNTEDSFVCQCSEGFLINEDLKTCSRVDYCLLSDHGCEYSCVNMDRSFACQCPEGHVLRSDGKTCAKLDSCALGDHGCEHSCVSSEDSFVCQCFEGYILREDGKTCRRKDVCQAIDHGCEHICVNSDDSYTCECLEGFRLAEDGKRCRRKDVCKSTHHGCEHICVNNGNSYICKCSEGFVLAEDGRRCKKCTEGPIDLVFVIDGSKSLGEENFEVVKQFVTGIIDSLTISPKAARVGLLQYSTQVHTEFTLRNFNSAKDMKKAVAHMKYMGKGSMTGLALKHMFERSFTQGEGARPLSTRVPRAAIVFTDGRAQDDVSEWASKAKANGITMYAVGVGKAIEEELQEIASEPTNKHLFYAEDFSTMDEISEKLKKGICEALEDSDGRQDSPAGELPKTVQQPTESEPVTINIQDLLSCSNFAVQHRYLFEEDNLLRSTQKLSHSTKPSGSPLEEKHDQCKCENLIMFQNLANEEVRKLTQRLEEMTQRMEALENRLRYR

SEQ ID NO: 5698 - protein, 211 aa, Homo Sapiens
MTTLTRQDLNFGQVVADVLCEFLEVAVHLILYVREVYPVGIFQKRKKYNVPVQMSCHPELNQYIQDTLHCVKPLLEKNDVEKVVVVILDKEHRPVEKFVFEITQPPLLSISSDSLLSHVEQLLRAFILKISVCDAVLDHNPPGCTFTVLVHTREAATRNMEKIQVIKDFPWILADEQDVHMHDPRLIPLKTMTSDILKMQLYVEERAHKGS

SEQ ID NO: 5699 - protein, 953 aa, Homo Sapiens
MEEQGHSEMEIIPSESHPHIQLLKSNRELLVTHIRNTQCLVDNLLKNDYFSAEDAEIVCACPTQPDKVRKILDLVQSKGEEVSEFFLYLLQQLADAYVDLRPWLLEIGFSPSLLTQSKVVVNTDPVSRYTQQLRHHLGRDSKFVLCYAQKEELLLEEIYMDTIMELVGFSNESLGSLNSLACLLDHTTGILNEQGETIFILGDAGVGKSMLLQRLQSLWATGRLDAGVKFFFHFRCRMFSCFKESDRLCLQDLLFKHYCYPERDPEEVFAFLLRFPHVALFTFDGLDELHSDLDLSRVPDSSCPWEPAHPLVLLANLLSGKLLKGASKLLTARTGIEVPRQFLRKKVLLRGFSPSHLRAYARRMFPERALQDRLLSQLEANPNLCSLCSVPLFCWIIFRCFQHFRAAFEGSPQLPDCTMTLTDVFLLVTEVHLNRMQPSSLVQRNTRSPVETLHAGRDTLCSLGQVAHRGMEKSLFVFTQEEVQASGLQERDMQLGFLRALPELGPGGDQQSYEFFHLTLQAFFTAFFLVLDDRVGTQELLRFFQEWMPPAGAATTSCYPPFLPFQCLQGSGPAREDLFKNKDHFQFTNLFLCGLLSKAKQKLLRHLVPAAALRRKRKALWAHLFSSLRGYLKSLPRVQVESFNQVQAMPTFIWMLRCIYETQSQKVGQLAARGICANYLKLTYCNACSADCSALSFVLHHFPKRLALDLDNNNLNDYGVRELQPCFSRLTVLRLSVNQITDGGVKVLSEELTKYKIVTYLGLYNNQITDVGARYVTKILDECKGLTHLKLGKNKITSEGGKYLALAVKNSKSISEVGMWGNQVGDEGAKAFAEALRNHPSLTTLSLASNGISTEGGKSLARALQQNTSLEILWLTQNELNDEVAESLAEMLKVNQTLKHLWLIQNQITAKGTAQLADALQSNTGITEICLNGNLIKPEEAKVYEDEKRIICF

SEQ ID NO: 5700 - protein, 206 aa, Homo Sapiens [sequence omitted]

SEQ ID NO: 5701 - protein, 537 aa, Homo Sapiens [sequence omitted]

SEQ ID NO: 5702 - protein, 1093 aa, Homo Sapiens
VQAKGTPAGEEARREKRPQREPGHRGLPALGAEPPALGSPRGAGAGTDFFCRIILWNDIFIMSQQGYVATPPYSQPQPGIGLSPPHYGHYGDPSHTASPTGMMKPAGPLGATATRGMLPPGPPPPGPHQFGQNGAHATGHPPQRFPGPPPVNNVASSHAPYQPSAQSSYPGPISTSSVTQLGSQLSAMQINSYGSGMAPPSQGPPGPLSATSLQTPPRPPQPSILQPGSQVLPPPPTTLNGPGASPLPLPMYRPDGLSGPPPPNAQYQPPPLPGQTLGAGYPPQQANSGPQMAGAQLSYPGGFPGGPAQMAGPPQPQKKLDPDSIPSPIQVIENDRASRGGQVYATNTRGQIPPLVTTDCMIQDQGNASPRFIRCTTYCFPCTSDMAKQAQIPLAAVIKPFATIPSNESPLYLVNHGESGPVRCNRCKAYMCPFMQFIEGGRRYQCGFCNCVNDVPPFYFQHLDHIGRRLDHYEKPELSLGSYEYVATLDYCRKSKPPNPPAFIFMIDVSYSNIKNGLVKLICEELKTMLEKIPKEEQEETSAIRVGFITYNKVLHFFNVKSNLAQPQMMVVTDVGEVFVPLLDGFLVNYQESQSVIHNLLDQIPDMFADSNENETVFASVIQAGMEALKAADCPGKLFIFHSSLPTAEAPGKLKNRDDKKLVNTDKEKILFQPQTNVYDSLAKDCVAHGCSVTLFLFPSQYVDVASLGLVPQLTGGTLYKYNNFQMHLDRQQFLNDLRNDIEKKIGFDAIMRVRTSTGFRATDFFGGILMNNTTDVEMAAIDCDKAVTVEFKHDDKLSEDSGALIQCAVLYTTISGQRRLRIHNLGLNCSSQLADLYKSCETDALINFFAKSAFKAVLHQPLKVIREILVNQTAHMLACYRKNCASPSAASQLILPDSMKVLPVYMNCLLKNCVLLSRPEISTDERAYQRQLVMTMGVADSQLFFYPQLLPIHTLDVKSTMLPAAVRCSESRLSEEGIFLLANGLHMFLWLGVSSPPELIQGIFNVPSFAHINTDMTLLPEVGNPYSQQLRMIMGIIQQKRPYSMKLTIVKQREQPEMVFRQFLVEDKGLYGGSSYVDFLCCVHKEICQLLN

SEQ ID NO: 5703 - protein, 823 aa, Homo Sapiens
MFYVIGGITVSVVAFFFTIKFLFELAARVVSFLQNEDRERRGDRTIYDYVRGNYLDPRSCKVSWDWKDPYEVGHSMAFRVHLFYKNGQPFPAHRPVGLRVHISHVELAVEIPVTQEVLQEPNSNVVKVAFTVRKAGRYEITVKLGGLNVAYSPYYKIFQPGMVVPSKTKIVCHFSTLVLTCGQPHTLQIVPRDEYDNPTNNSMSLRDEHNYTLSIHELGPQEEESTGVSFEKSVTSNRQTFQVFLRLTLHSRGCFHACISYQNQPINNGEFDIIVLSEDEKNIVERNVSTSGVSIYFEAYLYNATNCSSTPWHLPPMHMTSSQRRPSTAVDEEDEDSPSECHTPEKVKKPKKVYCYVSPKQFSVKEFYLKIIPWRLYTFRVCPGTKFSYLGPDPVHKLLTLVVDDGIQPPVELSCKERNILAATFIRSLHKNIGGSETFQDKVNFFQRELRQVHMKRPHSKVTLKVSRHALLESSLKATRNFSISDWSKNFEVVFQDEEALDWGGPRREWFELICKALFDTTNQLFTRFSDNNQALVHPNPNRPAHLRLKMYEFAGRLVGKCLYESSLGGAYKQLVRARFTRSFLAQIIGLRMHYKYFETDDPEFYKSKVCFILNNDMSEMELVFAEEKYNKSGQLDKVVELMTGGAQTPVTNANKIFYLNLLAQYRLASQVKEEVEHFLKGLNELVPENLLAIFDENELELLMCGTGDISVSDFKAHAVVVGGSWHFREKVMRWFWTVVSSLTQEELARLLQFTTGSSQLPPGGFAALCPSFQIIAAPTHSTLPTAHTCFNQLCLPTYDSYEEVHRMLQLAISEGCEGFGML

SEQ ID NO: 5704 - protein, 971 aa, Homo Sapiens
VSLAFCQPLSLSLSPLLPLASSLAPERTHLPGPGSLLLSPPSFPARPREPRGCVTAAPPDKMDTAEEDICRVCRSEGTPEKPLYHPCVCTGSIKFIHQECLVQWLKHSRKEYCELCKHRFAFTPIYSPDMPSRLPIQDIFAGLVTSIGTAIRYWFHYTLVAFAWLGVVPLTACRIYKCLFTGSVSSLLTLPLDMLSTENLLADCLQGCFVVTCTLCAFISLVWLREQIVHGGAPIWLEHAAPPFNAAGHHQNEAPAGGNGAENVAADQPANPPAENAVVGENPDAQDDQAEEEEEDNEEEDDAGVEDAADANNGAQDDMNWNALEWDRAAEELTWERMLGLDGSLVFLEHVFWVVSLNTLFILVFAFCPYHIGHFSLVGLGFEEHVQASHFEGLITTIVGYILLAITLIICHGLATLVKFHRSRRLLGVCYIVVKVSLLVVVEIGVFPLICGWWLDICSLEMFDATLKDRELSFQSAPGTTMFLHWLVGMVYVFYFASFILLLREVLRPGVLWFLRNLNDPDFNPVQEMIHLPIYRHLRRFILSVIVFGSIVLLMLWLPIRIIKSVLPNFLPYNVMLYSDAPVSELSLELLLLQVVLPALLEQGHTRQWLKGLVRAWTVTAGYLLDLHSYLLGDQEENENSANQQVNNNQHARNNNAIPVVGEGLHAAHQAILQQGGPVGFQPYRRPLNFPLRIFLLIVFMCITLLIASLICLTLPVFAGRWLMSFWTGTAKIHELYTAACGLYVCWLTIRAVTVMVAWMPQGRRVIFQKVKEWSLMIMKTLIVAVLLAGVVPLLLGLLFELVIVAPLRVPLDQTPLFYPWQDWALGVLHAKIIAAITLMGPQWWLKTVIEQVYANGIRNIDLHYIVRKLAAPVISVLLLSLCVPYVIASGVVPLLGVTAEMQNLVHRRIYPFLLMVVVLMAILSFQVRQFKRLYEHIKNDKYLVGQRLVNYERKSGKQGSSPPPPQSSQE

SEQ ID NO: 5705 - protein, 72 aa, Homo Sapiens
MRPCIWIHVHLKPPCRLVELLPFSSALQGLSHLSLGTTLPVILPERNEEQNLQELSHNADKYQMGDCCKEEI

SEQ ID NO: 5706 - protein, 123 aa, Homo Sapiens
MKAVLLALLMAGLALQPGTALLCYSCKAQVSNEDCLQVENCTQLGEQCWTARIRAVGLLTVISKGCSLNCVDDSQDYYVGKKNITCCDTDLCNASGAHALQPAAAILALLPALGLLLWGPGQL

SEQ ID NO: 5707 - protein, 324 aa, Homo Sapiens
MSRPSSTGPSANKPCSKQPPPQPQHTPSPAAPPAAATISAAGPGSSAVPAAAAVISGPGGGGGAGPVSPQHHELTSLFECPVCFDYVLPPILQCQAGHLVCNQCRQKLSCCPTCRGALTPSIRNLAMEKVASAVLFPCKYATTGCSLTLHHTEKPEHEDICEYRPYSCPCPGASCKWQGSLEAVMSHLMHAHKSITTLQEEDIVFLATDINLPGAVDWVMMQSCFGHHFMLVLEKQEKYEGHQQFFAIVLLIGTRKQAENFAYRLELNGNRRRLTWEATPRSIHDGVAAAIMNSDCLVFDTAIAHLFADNGNLGINVTISTCCP

SEQ ID NO: 5708 - protein, 412 aa, Homo Sapiens
MILASVLRSGPGGGLPLRPLLGPALALRARSTSATDTHHVEMARERSKTVTSFYNQSAIDAAAEKPSVRLTPTMMLYAGRSQDGSHLLKSARYLQQELPVRIAHRIKGFRCLPFIIGCNPTILHVHELYIRAFQKLTDFPPIKDQADEAQYCQLVRQLLDDHKDVVTLLAEGLRESRKHIEDEKLVRYFLDKTLTSRLGIRMLATHHLALHEDKPDFFGIICTRLSPKKIIEKWVDFARRLCEHKYGNAPRVRINGHVAARFPFIPMPLDYILPELLKNAMRATMESHLDTPYNVPDVVITIANNDVDLIIRISDRGGGIAHKDLDRVMDYHFTTAEASTQDPRISPLFGHLDMHSGAQSGPMHGFGFGLPTSRAYAEYLGGSLQLQSLQGIGTDVYLRLRHIDGREESFRI

SEQ ID NO: 5709 - protein, 297 aa, Homo Sapiens
MSSAHFNRGPAYGLSAEVKNKLAQKYDHQREQELREWIEGVTGRRIGNNFMDGLKDGIILCEFINKLQPGSVKKINESTQNWHQLENIGNFIKAITKYGVKPHDIFEANDLFENTNHTQVQSTLLALASMAKTKGNKVNVGVKYAEKQERKFEPGKLREGRNIIGLQMGTNKFASQQGMTAYGTRRHLYDPKLGTDQPLDQATISLQMGTNKGASQAGMTAPGTKRQIFEPGLGMEHCDTLNVSLQMGSNKGASQRGMTVYGLPRQVYDPKYCLTPEYPELGEPAHNHHAHNYYNSA

SEQ ID NO: 5710 - protein, 794 aa, Homo Sapiens
WPQPRRRAPAAAAAQPGPAAAPQPCSPAAPAAPSPARTAPGGGPQRGHKDPRRRLSADRSYLKSIMSFGRDMELEHFDERDKAQRYSRGSRVNGLPSPTHSAHCSFYRTRTLQTLSSEKKAKKVRFYRNGDRYFKGIVYAISPDRFRSFEALLADLTRTLSDNVNLPQGVRTIYTIDGLKKISSLDQLVEGESYVCGSIEPFKKLEYTKNVNPNWSVNVKTTSASRAVSSLATAKGSPSEVRENKDFIRPKLVTIIRSGVKPRKAVRILLNKKTAHSFEQVLTDITDAIKLDSGVVKRLYTLDGKQVMCLQDFFGDDDIFIACGPEKFRYQDDFLLDESECRVVKSTSYTKIASSSRRSTTKSPGPSRRSKSPASTSSVNGTPGSQLSTPRSGKSPSPSPTSPGSLRKQRSSQHGGSSTSLASTKVCSSMDENDGPGEEVSEEGFQIPATITERYKVGRTIGDGNFAVVKECVERSTAREYALKIIKKSKCRGKEHMIQNEVSILRRVKHPNIVLLIEEMDVPTELYLVMELVKGGDLFDAITSTNKYTERDASGMLYNLASAIKYLHSLNIVHRDIKPENLLVYEHQDGSKSLKLGDFGLATIVDGPLYTVCGTPTYVAPEIIAETGYGLKVDIWAAGVITYILLCGFPPFRGSGDDQEVLFDQILMGQVDFPSPYWDNVSDSAKELITMMLLVDVDQRFSAVQVLEHPWVNDDGLPENEHQLSVAGKIKKHFNTGPKPNSTAAGVSVIALDHGFTIKRSGSLDYYQQPGMYWIRPPLLIRRGRFSDEDATRM

SEQ ID NO: 5711 - protein, 887 aa, Homo Sapiens [sequence omitted]

SEQ ID NO: 5712 - protein, 810 aa, Homo Sapiens
MPMDLILVVWFCVCTARTVVGFGMDPDLQMDIVTELDLVNTTLGVAQVSGMHNASKAFLFQDIEREIHAAPHVSEKLIQLFQNKSEFTILATVQQKPSTSGVILSIRELEHSYFELESSGLRDEIRYHYIHNGKPRTEALPYRMADGQWHKVALSVSASHLLLHVDCNRIYERVIDPPDTNLPPGINLWLGQRNQKHGLFKGIIQDGKIIFMPNGYITQCPNLNHTCPTCSDFLSLVQGIMDLQELLAKMTAKLNYAETRLSQLENCHCEKTCQVSGLLYRDQDSWVDGDHCRNCTCKSGAVECRRMSCPPLNCSPDSLPVHIAGQCCKVCRPKCIYGGKVLAEGQRILTKSCRECRGGVLVKITEMCPPLNCSEKDHILPENQCCRVCRGHNFCAEGPKCGENSECKNWNTKATCECKSGYISVQGDSAYCEDIDECAAKMHYCHANTVCVNLPGLYRCDCVPGYIRVDDFSCTEHDECGSGQHNCDENAICTNTVQGHSCTCKPGYVGNGTICRAFCEEGCRYGGTCVAPNKCVCPSGFTGSHCEKDIDECSEGIIECHNHSRCVNLPGWYHCECRSGFHDDGTYSLSGESCIDIDECALRTHTCWNDSACINLAGGFDCLCPSGPSCSGDCPHEGGLKHNGQVWTLKEDRCSVCSCKDGKIFCRRTACDCQNPSADLFCCPECDTRVTSQCLDQNGHKLYRSGDNWTHSCQQCRCLEGEVDCWPLTCPNLSCEYTAILEGECCPRCVSDPCLADNITYDIRKTCLDSYGVSRLSGSVWTMAGSPCTTCKCKNGRVCCSVDFECLQNN

SEQ ID NO: 5713 - protein, 618 aa, Homo Sapiens
MKSPRRTTLCLMFIVIYSSKAALNWNYESTIHPLSLHEHEPAGEEALRQKRAVATKSPTAEEYTVNIEISFENASFLDPIKAYLNSLSFPIHGNNTDQITDILSINVTTVCRPAGNEIWCSCETGYGWPRERCLHNLICQERDVFLPGHHCSCLKELPPNGPFCLLQEDVTLNMRVRLNVGFQEDLMNTSSALYRSYKTDLETAFRKGYGILPGFKGVTVTGFKSGSVVVTYEVKTTPPSLELIHKANEQVVQSLNQTYKMDYNSFQAVTINESNFFVTPEIIFEGDTVSLVCEKEVLSSNVSWRYEEQQLEIQNSSRFSIYTALFNNMTSVSKLTIHNITPGDAGEYVCKLILDIFEYECKKKIDVMPIQILANEEMKVMCDNNPVSLNCCSQGNVNWSKVEWKQEGKINIPGTPETDIDSSCSRYTLKADGTQCPSGSSGTTVIYTCEFISAYGARGSANIKVTFISVANLTITPDPISVSEGQNFSIKCISDVSNYDEVYWNTSAGIKIYQRFYTTRRYLDGAESVLTVKTSTREWNGTYHCIFRYKNSYSIATKDVIVHPLPLKLNIMIDPLEATVSCSGSHHIKCCIEEDGDYKVTFHMGSSSLPAVKKKKKK

SEQ ID NO: 5714 - protein, 440 aa, Homo Sapiens
MVPEPGPTANSTPAWGAGPPSAPGGSGWVAAALCVVIALTAAANSLLIALICTQPALRNTSNFFLVSLFTSDLMVGLVVMPPAMLNALYGRWVLARGLCLLWTAFDVMCCSASILNLCLISLDRYLLILSPLRYKLRMTPLRALALVLGAWSLAALASFLPLLLGWHELGHARPPVPGQCRLLASLPFVLVASGLTFFLPSGAICFTYCRILLAARKQAVQVASLTTGMASQASETLQVPRTPRPGVESADSRRLATKHSRKALKASLTLGILLGMFFVTWLPFFVANIVQAVCDCISPGLFDVLTWLGYCNSTMNPIIYPLFMRDFKRALGRFLPCPRCPRERQASLASPSLRTSHSGPRPGLSLQQVLPLPLPPDSDSDSDAGSGGSSGLRLTAQLLLPGEATQDPPLPTRAAAAVNFFNIDPAEPELRPHPLGIPTN

SEQ ID NO: 5715 - protein, 1205 aa, Homo Sapiens
GCAFSGICTLHFHSCSEINSSLAAREENVATFRGSEYLCYDLSQNPIQSSSDEITLSFKTWQRNGLILHTGKSADYVNLALKDGAVSLVINLGSGAFEAIVEPVNGKFNDNAWHDVKVTRNLRQVTISVDGILTTTGYTQEDYTMLGSDDFFYVGGSPSTADLPGSPVSNNFMGCLKEVVYKNNDIRLELSRLARIADTKMKIYGEVVFKCENVATLDPINFETPEAYISLPKWNTKRMGSISFDFRTTEPNGLILFTHGKPQERKDARSQKNTKVDFFAVELLDGNLYLLLDMGSGTIKVKATQKKANDGEWYHVDIQRDGRSGTISVNSRRTPFTASGESEILDLEGDMYLGGLPENRAGLILPTELWTAMLNYGYVGCIRDLFIDGRSKNIRQLAEMQNAAGVKSSCSRMSAKQCDSYPCKNNAVCKDGWNRFICDCTGTGYWGRTCEREASILSYDGSMYMKIIMPMVMHTEAEDVSFRFMSQRAYGLLVATTSRDSADTLRLELDGGRVKLMVNLDCIRINCNSSKGPETLYAGQKLNDNEWHTVRVVRRGKSLKLTVDDDVAEGTMVGDHTRLEFHNIETGIMTEKRYISVVPSSFIGHLQSLMFNGLLYIDLCKNGDIDYCELKARFGLRNIIADPVTFKTKSSYLSLATLQAYTSMHLFFQFKTTSPDGFILFNSGDGNDFIAVELVKGYIHYVFDLGNGPNVIKGNSDRPLNDNQWHNVVITRDNSNTHSLKVDTKVVTQVINGAKNLDLKGDLYMAGLAQGMYSNLPKLVASRDGFQGCLASVDLNGRLPDLINDALHRSGQIKRGCEGPSTTCQEDSCANQGVCMQQWEGFTCDCSMTSYSGNQCNDPGATYIFGKSGGLILYTWPANDRPSTRSDRLAVGFSTTVKDGILVRIDSAPGLGDFLQLHIEQGKIGVVFNIGTVDISIKEERTPVNDGKYHVVRFTRNGGNATLQVDNWPVNEHYPTGRQLTIFNTQAQIAIGGKDKGRLFQGQLSGLYYDGLKVLNMAAENNPNIKINGSVRLVGEVPSILGTTQTTSMPPEMSTTVMETTTTMATTTTRKNRSTASIQPTSDDLVSSAECSSDDEDFVECEPSTANPTEPGIRRVPGASEVIRESSSTTGMVVGIVAAAALCILILLYAMYKYRNRDEGSYQVDETRNYISNSAQSNGTLMKEKQQSSKSGHKKQKNKDREYYV

SEQ ID NO: 5716 - protein, 1631 aa, Homo Sapiens
IPIYANVHKTKKNDDPSKDYHVPSSDQNICIELSNSGSVQTSSPPQLETVRKNLEDSDASVERSQYPQSDDKLSPPKRDFPTAEEPHLNLGSLNDSLFGSDNIKIESLITKKTVDHTVEEQQTEKVKLITENLSKLPNADSECLSFVGCSTSGTNSGNGTNGLLEGSPPSPFFKFQGEMIVNDLYVPSSPILAPVRSRSKLVSRPSRSFLLRHRPVPEIPGSTKGVSGSYFRERRNVATSTEKSVAWQNSNEENSSSIFPYGETFLFQRLENSKKRSIKNEFLTQGEALKGEAATATNSFIIKSSIYDNRKEKISEDKVEDIWIPREDKNNFLIDTASESEYSTVEECFQSLRRKNSKASKSRTQKALILDSVNRHSYPLSSTSGNADSSAVSSQAISPYACFYGASAKKVKSGWLDKLSPQGKRMFQKRWVKFDGLSISYYNNEKEMYSKGIIPLSAISTVRVQGDNKFEVVTTQRTFVFRVEKEEERNDWISILLNALKSQSLTSQSQAVVTPEKCGYLELRGYKAKIFTVLSGNSVWLCKNEQDFKSGLGITIIPMNVANVKQVDRTVKQSFEIITPYRSFSFTAETEKEKQDWIEAVQQSIAETLSDYEVAEKIWFNESNRSCADCKAPDPDWASINLCVVICKKCAGQHRSLGPKDSKVRSLKMDASIWSNELIELFIVIGNKRANDFWAGNLQKDEELHMDSPVEKRKNFITQKYKEGKFRKTLLASLTKEELNKALCAAVVKPDVLETMALLFSGADVMCATGDPVHSTPYLLAKKAGQSLQMEFLYHNKFSDFPQHDIHSEGVLSQESSQSTFLCDFLYQAPSAASKLSSEKKLLEETNKKWCVLEGGFLSYYENDKSTTPNGTININEVICLAIHKEDFYLNTGPIFIFEIYLPSERVFLFGAETSQAQRKWTEAIAKHFVPLFAENLTEADYDLIGQLFYKDCHALDQWRKGWFAMDKSSLHFCLQMQEVQGDRMHLRRLQELTISTMVQNGEKLDVLLLVEKGRTLYIHGHTKLDFTVWHTAIEKAAGTDGNALQDQQLSKNDVPIIVNSCIAFVTQYGLGCKYIYQKNGDPLHISELLESFKKDARSFKLRAGKHQLEDVTAVLKSFLSDIDDALLTKELYPYWISALDTQDDKERIKKYGAFIRSLPGVNRATLAAIIEHLYRVQKCSEINHMNAHNLALVFSSCLFQTKGQTSEEVNVIEDLINNYVEIFEVKEDQVKQMDIENSFITKWKDTQVSQAGDLLIEVYVERKEPDCSIIIRISPVMEAEELTNDILAIKNIIPTKGDIWATFEVIENEELERPLHYKENVLEQVLRWSSLAEPGSAYLVVKRFLTADTIKHCSDRSTLGSIKEGILKIKEEPSKILSGNKFQDRYFVLRDGFLFLYKDVKSSKHDKMFSLSSMKFYRGVKKKMKPPTSWGLTAYSEKHHWHLCCDSSQTQTEWMTSIFIAQHEYDIWPPAGKERKRSITKNPKIGGLPLIPIQHEGNATLARKNIESARAELERLRLSEKCDKESVDSSLKERASMVAHCLEHKDDKLRNRPRKHRSFNCLEDTEPEAPLGQPKGHKGLKTLRKTEDRNSKATLDSDHKLPSRVIEELNVVLQRSRTLPKELQDEQILK

SEQ ID NO: 5717 - protein, 374 aa, Homo Sapiens
MVLWESPRQCSSWTLCEGFCWLLLLPVMLLIVARPVKLAAFPTSLSDCQTPTGWNCSGYDDRENDLFLCDTNTCKFDGECLRIGDTVTCVCQFKCNNDYVPVCGSNGESYQNECYLRQAACKQQSEILVVSEGSCATDAGSGSGDGVHEGSGETSQKETSTCDICQFGAECDEDAEDVWCVCNIDCSQTNFNPLCASDGKSYDNACQIKEASCQKQEKIEVMSLGRCQDNTTTTTKSEDGHYARTDYAENANKLEESAREHHIPCPEHYNGFCMHGKCEHSINMQEPSCRCDAGYTGQHCEKKDYSVLYVVPGPVRFQYVLIAAVIGTIQIAVICVVVLCITRKCPRSNRIHRQKQNTGHYSSDNTTRASTRLI

SEQ ID NO: 5718 - protein, 485 aa, Homo Sapiens
MNEYPKKRKRKTLHPSRYSDSSGISRIADGFNGIFSDHCYSVCSMRQPDLKYFDNKDDDSDTETSNDLPKFADGIKARNRNQNYLVPSPVLRILDHTAFSTEKSADIVICDEECDSPESVNQQTQEESPIEVHTAEDVPIAVEVHAISEDYDIETENNSSESLQDQTDEEPPAKLCKILDKSQALNVTAQQKWPLLRANSSGLYKCELCEFNSKYFSDLKQHMILKHKRTDSNVCRVCKESFSTNMLLIEHAKLHEEDPYICKYCDYKTVIFENLSQHIADTHFSDHLYWCEQCDVQFSSSSELYLHFQEHSCDEQYLCQFCEHETNDPEDLHSHVVNEHACKLIELSDKYNNGEHGQYSLLSKITFDKCKNFFVCQVCGFRSRLHTNVNRHVAIEHTKIFPHVCDDCGKGFSSMLEYCKHLNSHLSEGIYLCQYCEYSTGQIEDLKIHLDFKHSADLPHKCSDCLMRFGNERELISHLPVHETT

SEQ ID NO: 5719 - protein, 737 aa, Homo Sapiens
MADTQYILPNDIGVSSLDCREAFRLLSPTERLYAYHLSRAAWYGGLAVLLQTSPEAPYIYALLSRLFRAQDPDQLRQHALAEGLTEEEYQAFLVYAAGVYSNMGNYKSFGDTKFVPNLPKEKLERVILGSEAAQQHPEEVRGLWHTCGELMFSLEPRLRHLGLGKEGITTYFSGNCTMEDAKLAQDFLDSQNLSAYNTRLFKEVDGEGKPYYEVRLASVLGSEPSLDSEVTSKLKSYEFRGSPFQVTRGDYAPILQKVVEQLEKAKAYAANSHQGQMLAQYIESFTQGSIEAHKRGSRFWIQDKGPIVESYIGFIESYRDPFGSRGEFEGFVAVVNKAMSAKFERLVASAEQLLKELPWPPTFEKDKFLTPDFTSLDVLTFAGSGIPAGINIPNYDDLRQTEGFKNVSLGNVLAVAYATQREKLTFLEEDDKDLYILWKGPSFDVQVGLHELLGHGSGKLFVQDEKGAFNFDQETVINPETGEQIQSWYRSGETWDSKFSTIASSYEECRAESVGLYLCLHPQVLEIFGFEGADAEDVIYVNWLNMVRAGLLALEFYTPEAFNWRQAHMQARFVILRVLLEAGEGLVTITPTTGSDGRPDARVRLDRSKIRSVGKPALERFLRRLQVLKSTGDVAGGRALYEGYATVTDAPPECFLTLRDTVLLRKESRKLIVQPNTHLEGSDVQLLEYEASAAGLIRSFSERFPEDGPELEEILTQLATADARFWKGPSEAPSGQA

SEQ ID NO: 5720 - protein, 820 aa, Homo Sapiens
ALFDGDPHLSTENPALVPDALLASDTCLDISEAAFDHSFSDASGLNTSTGTIDDMSKLTLSEGHPETPVDGDLGKQDICSSEASWGDFEYDVMGQNIDEDLLREPEHFLYGGDPPLEEDSLKQSLAPYTPPFDLSYLTEPAQSAETIEEAGSPEDESLGCRAAEIVLSALPDRRSEGNQAETKNRLPGSQLAVLHIREDPESVYLPVGAGSNILSPSNVDWEVETDNSDLPAGGDIGPPNGASKEIPELEEEKTIPTKEPEQIKSEYKEERCTEKNEDRHALHMDYILVNREENSHSKPETCEERESIAELELYVGSKETGLQGTQLASFPDTCQPASLNERKGLSAEKMSSKGDTRSSFESPAQDQSWMFLGHSEVGDPSLDARDSGPGWSGKTVEPFSELGLGEGPQLQILEEMKPLESLALEEASGPVSQSQKSKSRGRAGPDAVTHDSEWEMLSPQPVQKNMISDTEMEEETEFLELGTRISRPNGLLSEDVGMDIPFEEGVLSPSAADMRPEPPNSLDLNDTHPRRIKLTAPNINLSLDQSEGSILSDDNLDSPDEIDINVDELDTPDEADSFEYTGHEDPTANKDSGQESESIPEYTAEEEREDNRLWRTVVIGEQEQRIDMKVIEPYRRVISHGGYYGDGLNAIIVFAACFLPDSSRADYHYVMENLFLYVISTLELMVAEDYMIVYLNGATPRRRMPGLGWMKKCYQMIDRRLRKNLKSFIIVHPSWFIRTILAVTRPFISSKFSSKIKYVNSLSELSGLIPMDCIHIPESIIKLDEELREASEAAKTSCLYNDPEMSSMEKDIDLKLKEKP

SEQ ID NO: 5721 - protein, 352 aa, Homo Sapiens [sequence omitted]

SEQ ID NO: 5722 - protein, 632 aa, Homo Sapiens [sequence omitted]

SEQ ID NO: 5723 - protein, 512 aa, Homo Sapiens [sequence omitted]

SEQ ID NO: 5724 - protein, 394 aa, Homo Sapiens
MKRQNVRTLALIVCTFTYLLVGAAVFDALESEPELIERQRLELRQQELRARYNLSQGGYEELERVVLRLKPHKAGVQWRFAGSFYFAITVITTIGYGHAAPSTDGGKVFCMFYALLGIPLTLVMFQSLGERINTLVRYLLHRAKKGLGMRRADVSMANMVLIGFFSCISTLCIGAAAFSHYEHWTFFQAYYYCFITLTTIGFGDYVALQKDQALQTQPQYVAFSFVYILTGLTVIGAFLNLVVLRFMTMNAEDEKRDAEHRALLTRNGQAGGGGGGGSAHTTDTASSTAAAGGGGFRNVYAEVLHFQSMCSCLWYKSREKLQYSIPMIIPRDLSTSDTCVEQSHSSPGGGGRYSDTPSRRCLCSGAPRSAISSVSTGLHSLSTFRGLMKRRSSV

SEQ ID NO: 5725 - protein, 254 aa, Homo Sapiens
EKITTWQDPRKAMNQPLNHMNLHPAVSSTPVPQRSMAVSQPNLVMNHQHQQQMAPSTLSQQNHPTQNPPAGLMSMPNALTTQQQQQQKLRLQRIQMERERIRMRQEELMRQEAALCRQLPMEAETLAPVQAAVNPPTMTPDMRSITNNSSDPFLNGGPYHSREQSTDSGLGLGCYSVPTTPEDFLSNVDEMDTGENAGQTPMNINPQQTRFPDFLDCLPGTNVDLGTLESEDLIPLFNDVESALNKSEPFLTWL

SEQ ID NO: 5726 - protein, 947 aa, Homo Sapiens
GRGLLQQRGGRESGPAPPAAKLRPPPEGSAGACAPVPAAAAVAAGPEPAPAGPAKPAGPAALAARAGPGPGPGPGPGPGPGKPAGPGAAQTLNGSAALLNSHHAAAPAVSLVNNGPAALLPLPKPAAPAAAPPPPPPAPATLARPPGHPAGPPTAALAVPPPAAAQNGGSAGAAPAPAPAAGGPAGVSGQPGPGAAAAAPAPGVKAESPKRVVQAAPPAAQTLAASGPASTAASMVIGPTMQGALPSPAAVPPPAPGTPTGLPKGAAGAVTQSLSRTPTATTSGIRATLTPTVLAPRLPQPPQNPTNIQNFQLPPGMVLVRSENGQLLMIPQQALAQMQAQAHAQPQTTMAPRPATPTSAPPVQISTVQAPGTPIIARQVTPTTIIKQVSQAQTTVQPSATLQRSPGVQPQLVLGGAAQTASLGTATAVQTGTPQRTVPGATTTSSAATETMENVKKCKNFLSTLIKLASSGKQSTETAANVKELVQNLLDGKIEAEDFTSRLYRELNSSPQPYLVPFLKRSLPALRQLTPDSAAFIQQSQQQPPPPTSQATTALTAVVLSSSVQRTAGKTAATVTSALQPPVLSLTQPTQVGVGKQGQPTPLVIQQPPKPGALIRPPQVTLTQTPMVALRQPHNRIMLTTPQQIQLNPLQPVPVVKPAVLPGTKALSAVSAQAAAAQKNKLKEPGGGSFRDDDDINDVASMAGVNLSEESARILATNSELVGTLTRSCKDETFLLQAPLQRRILEIGKKHGITELHPDVVSYVSHATQQRLQNLVEKISETAQQKNFSYKDDDRYEQASDVRAQLKFFEQLDQIEKQRKDEQEREILMRAAKSRSRQEDPEQLRLKQKAKEMQQQELAQMRQRDANLTALAAIGPRKKRKVDCPGPGSGAEGSGPGSVVPGSSGVGTPRQFTRQRITRVNLRDLIFCLENERETSHSLLLYKAFLK

SEQ ID NO: 5727 - protein, 408 aa, Homo Sapiens
GLSKAKSQVFKNQDPVLPPRPKPGHPLYSKYMLSVPHGIANEDIVSQNPGELSCKRGDVLVMLKQTENNYLECQKGEDTGRVHLSQMKIITPLDEHLRSRPNDPSHAQKPVDSGAPHAVVLHDFPAEQVDDLNLTSGEIVYLLEKIDTDWYRGNCRNQIGIFPANYVKVIIDIPEGGNGKRECVSSHCVKGSRCVARFEYIGEQKDELSFSEGEIIILKEYVNEEWARGEVRGRTGIFPLNFVEPVEDYPTSGANVLSTKVPLKTKKEDSGSNSQVNSLPAEWCEALHSFTAETSDDLSFKRGDRIQILERLDSDWCRGRLQDREGIFPAVFVRPCPAEAKSMLAIVPKGRKAKALYDFRGENEDELSFKAGDIITELESVDDDWMSGELMGKSGIFPKNYIQFLQIS

SEQ ID NO: 5728 - protein, 287 aa, Homo Sapiens
GRWASGEMAPSGSLAVPLAVLVLLLWGAPWTHGRRSNVRVITDENWRELLEGDWMIEFYAPWCPACQNLQPEWESFAEWGEDLEVNIAKVDVTEQPGLSGRFIITALPTIYHCKDGEFRRYQGPRTKKDFINFISDKEWKSIEPVSSWFGPGSVLMSSMSALFQLSMWIRTCHNYFIEDLGLPVWGSYTVFALATLFSGLLLGLCMIFVADCLCPSKRRRPQPYPYPSKKLLSESAQPLKKVEEEQEADEEDVSEEEAESKEGTNKDFPQNAIRQRSLGPSLATDKS

SEQ ID NO: 5729 - protein, 835 aa, Homo Sapiens
GKIEMKVHMHTKFCLICLLTFIFHHCNHCHEEHDHGPEALHRQHRGMTELEPSKFSKQAAENEKKYYIEKLFERYGENGRLSFFGLEKLLTNLGLGERKVVEINHEDLGHDHVSHLDILAVQEGKHFHSHNHQHSHNHLNSENQTVTSVSTKRNHKCDPEKETVEVSVKSDDKHMHDHNHRLRHHHRLHHHLDHNNTHHFHNDSITPSERGEPSNEPSTETNKTQEQSDVKLPKGKRKKKGRKSNENSEVITPGFPPNHDQGEQYEHNRVHKPDRVHNPGHSHVHLPERNGHDPGRGHQDLDPDNEGELRHTRKREAPHVKNNAIISLRKDLNEDDHHHECLNVTQLLKYYGHGANSPISTDLFTYLCPALLYQIDSRLCIEHFDKLLVEDINKDKNLVPEDEANIGASAWICGIISITVISLLSLLGVILVPIINQGCFKFLLTFLVALAVGTMSGDALLHLLPHSQGGHDHSHQHAHGHGHSHGHESNKFLEEYDAVLKGLVALGGIYLLFIIEHCIRMFKHYKQQRGKQKWFMKQNTEESTIGRKLSDHKLNNTPDSDWLQLKPLAGTDDSVVSEDRLNETELTDLEGQQESPPKNYLCIEEEKIIDHSHSDGLHTIHEHDLHAAAHNHHGENKTVLRKHNHQWHHKHSHHSHGPCHSGSDLKETGIANIAWMVIMGDGIHNFSDGLAIGAAFSAGLTGGISTSIAVFCHELPHELGDFAVLLKAGMTVKQAIVYNLLSAMMAYIGMLIGTAVGQYANNITLWIFAVTAGMFLYVALVDMLPEMLHGDGDNEEHGFCPVGQFILQNLGLLFGFAIMLVIALYEDKIVFDIQF

SEQ ID NO: 5730 - protein, 114 aa, Homo Sapiens
MDKRRRALTRLYLDKATLIWNGNAVSGLDALNNFFDTLPSSEFQVNMLDCQPVHEQATQSQTTVLVVTSGTVKFDGNKQHFFNQNFLLTAQSTPNNTVWKIASDCFRFQDWSSS

SEQ ID NO: 5731 - protein, 1203 aa, Homo Sapiens
MGNLKSVAQEPGPPCGLGLGLGLGLCGKQGPATPAPEPSRAPASLLPPAPEHSPPSSPLTQPPEGPKFPRVKNWEVGSITYDTLSAQAQQDGPCTPRRCLGSLVFPRKLQGRPSPGPPAPEQLLSQARDFINQYYSSIKRSGSQAHEQRLQEVEAEVAATGTYQLRESELVFGAKQAWRNAPRCVGRIQWGKLQVFDARDCRSAQEMFTYICNHIKYATNRGNLRSAITVFPQRCPGRGDFRIWNSQLVRYAGYRQQDGSVRGDPANVEITELCIQHGWTPGNGRFDVLPLLLQAPDEPPELFLLPPELVLEVPLEHPTLEWFAALGLRWYALPAVSNMLLEIGGLEFPAAPFSGWYMSTEIGTRNLCDPHRYNILEDVAVCMDLDTRTTSSLWKDKAAVEINVAVLHSYQLAKVTIVDHHAATASFMKHLENEQKARGGCPADWAWIVPPISGSLTPVFHQEMVNYFLSPAFRYQPDPWKGSAAKGTGITRKKTFKEVANAVKISASLMGTVMAKRVKATILYGSETGRAQSYAQQLGRLFRKAFDPRVLCMDEYDVVSLEHETLVLVVTSTFGNGDPPENGESFAAALMEMSGPYNSSPRPEQHKSYKIRFNSISCSDPLVSSWRRKRKESSNTDSAGALGTLRFCVFGLGSRAYPHFCAFARAVDTRLEELGGERLLQLGQGDELCGQEEAFRGWAQAAFQAACETFCVGEDAKAAARDIFSPKRSWKRQRYRLSAQAEGLQLLPGLIHVHRRKMFQATIRSVENLQSSKSTRATILVRLDTGGQEGLQYQPGDHIGVCPPNRPGLVEALLSRVEDPPAPTEPVAVEQLEKGSPGGPPPGWVRDPRLPPCTLRQALTFFLDITSPPSPQLLRLLSTLAEEPREQQELEALSQDPRRYEEWKWFRCPTLLEVLEQFPSVALPAPLLLTQLPLLQPRYYSVSSAPSTHPGEIHLTVAVLAYRTQDGLGPLHYGVCSTWLSQLKPGDPVPCFIRGAPSFRLPPDPSLPCILVGPGTGIAPFRGFWQERLHDIESKGLQPTPMTLVFGCRCSQLDHLYRDEVQNAQQRGVFGRVLTAFSREPDNPKTYVQDILRTELAAEVHRVLCLERGHMFVCGDVTMATNVLQTVQRILATEGDMELDEAGDVIGVLRDQQRYHEDIFGLTLRTQEVTSRIRTQSFSLQERQLRGAVPWAFDPPGSDTNSP

SEQ ID NO: 5732 - protein, 2414 aa, Homo Sapiens
MAENVVEPGPPSAKRPKLSSPALSASASDGTDFGSLFDLEHDLPDELINSTELGLTNGGDINQLQTSLGMVQDAASKHKQLSELLRSGSSPNLNMGVGGPGQVMASQAQQSSPGLGLINSMVKSPMTQAGLTSPNMGMGTSGPNQGPTQSTGMMNSPVNQPAMGMNTGTNAGMNPGMLAAGNGQGIMPNQVMNGSIGAGRGRQDMQYPNPGMGSAGNLLTEPLQQGSPQMGGQTGLRGPQPLKMGMMNNPNPYGSPYTQNPGQQIGASGLGLQIQTKTVLSNNLSPFAMDKKAVPGGGMPNMGQQPAPQVQQPGLVTPVAQGMGSGAHTADPEKRKLIQQQLVLLLHAHKCQRREQANGEVRQCNLPHCRTMKNVLNHMTHCQSGKSCQVAHCASSRQIISHWKNCTRHDCPVCLPLKNAGDKRNQQPILTGAPVGLGNPSSLGVGQQSAPNLSTVSQIDPSSIERAYAALGLPYQVNQMPTQPQVQAKNQQNQQPGQSPQGMRPMSNMSASPMGVNGGVGVQTPSLLSDSMLHSAINSQNPMMSENASVPSLGPMPTAAQPSTTGIRKQWHEDITQDLRNHLVHKLVQAIFPTPDPAALKDRRMENLVAYARKVEGDMYESANNRAEYYHLLAEKIYKIQKELEEKRRTRLQKQNMLPNAAGMVPVSMNPGPNMGQPQPGMTSNGPLPDPSMIRGSVPNQMMPRITPQSGLNQFGQMSMAQPPIVPRQTPPLQHHGQLAQPGALNPPMGYGPRMQQPSNQGQFLPQTQFPSQGMNVTNIPLAPSSGQAPVSQAQMSSSSCPVNSPIMPPGSQGSHIHCPQLPQPALHQNSPSPVPSRTPTPHHTPPSIGAQQPPATTIPAPVPTPPAMPPGPQSQALHPPPRQTPTPPTTQLPQQVQPSLPAAPSADQPQQQPRSQQSTAASVPTPNAPLLPPQPATPLSQPAVSIEGQVSNPPSTSSTEVNSQAIAEKQPSQEVKMEAKMEVDQPEPADTQPEDISESKVEDCKMESTETEERSTELKTEIKEEEDQPSTSATQSSPAPGQSKKKIFKPEELRQALMPTLEALYRQDPESLPFRQPVDPQLLGIPDYFDIVKSPMDLSTIKRKLDTGQYQEPWQYVDDIWLMFNNAWLYNRKTSRVYKYCSKLSEVFEQEIDPVMQSLGYCCGRKLEFSPQTLCCYGKQLCTIPRDATYYSYQNRYHFCEKCFNEIQGESVSLGDDPSQPQTTINKEQFSKRKNDTLDPELFVECTECGRKMHQICVLHHEIIWPAGFVCDGCLKKSARTRKENKFSAKRLPSTRLGTFLENRVNDFLRRQNHPESGEVTVRVVHASDKTVEVKPGMKARFVDSGEMAESFPYRTKALFAFEEIDGVDLCFFGMHVQEYGSDCPPPNQRRVYISYLDSVHFFRPKCLRTAVYHEILIGYLEYVKKLGYTTGHIWACPPSEGDDYIFHCHPPDQKIPKPKRLQEWYKKMLDKAVSERIVHDYKDIFKQATEDRLTSAKELPYFEGDFWPNVLEESIKELEQEEEERKREENTSNESTDVTKGDSKNAKKKNNKKTSKNKSSLSRGNKKKPGMPNVSNDLSQKLYATMEKHKEVFFVIRLIAGPAANSLPPIVDPDPLIPCDLMDGRDAFLTLARDKHLEFSSLRRAQWSTMCMLVELHTQSQDRFVYTCNECKHHVETRWHCTVCEDYDLCITCYNTKNHDHKMEKLGLGLDDESNNQQAAATQSPGDSRRLSIQRCIQSLVHACQCRNANCSLPSCQKMKRVVQHTKGCKRKTNGGCPICKQLIALCCYHAKHCQENKCPVPFCLNIKQKLRQQQLQHRLQQAQMLRRRMASMQRTGVVGQQQGLPSPTPATPTTPTGQQPTTPQTPQPTSQPQPTPPNSMPPYLPRTQAAGPVSQGKAAGQVTPPTPPQTAQPPLPGPPPTAVEMAMQIQRAAETQRQMAHVQIFQRPIQHQMPPMTPMAPMGMNPPPMTRGPSGHLEPGMGPTGMQQQPPWSQGGLPQPQQLQSGMPRPAMMSVAQHGQPLNMAPQPGLGQVGISPLKPGTVSQQALQNLLRTLRSPSSPLQQQQVLSILHANPQLLAAFIKQRAAKYANSNPQPIPGQPGMPQGQPGLQPPTMPGQQGVHSNPAMQNMNPMQAGVQRAGLPQQQPQQQLQPPMGGMSPQAQQMNMNHNTMPSQFRDILRRQQMMQQQQQQGAGPGIGPGMANHNQFQQPQGVGYPPQPQQRMQHHMQQMQQGNMGQIGQLPQALGAEAGASLQAYQQRLLQQQMGSPVQPNPMSPQQHMLPNQAQSPHLQGQQIPNSLSNQVRSPQPVPSPRPQSQPPHSSPSPRMQPQPSPHHVSPQTSSPHPGLVAAQANPMEQGHFASPDQNSMLSQLASNPGMANLHGASATDLGLSTDNSDLNSNLSQSTLDIH

SEQ ID NO: 5733 - protein, 345 aa, Homo Sapiens
SQIGETVCKYNECGRTFIESLKLNISQRPHLEMEPYGCSICGKSFCMNLRFGHQRALTKDNPYEYNEYGEIFCDNSAFIIHQGAYTRKILREYKVSDKTWEKSALLKHQIVHMGGKSYDYNENGSNFSKKSHLTQLRRAHTGEKTFECGECGKTFWEKSNLTQHQRTHTGEKPYECTECGKAFCQKPHLTNHQRTHTGEKPYECKQCGKTFCVKSNLTEHQRTHTGEKPYECNACGKSFCHRSALTVHQRTHTGEKPFICNECGKSFCVKSNLIVHQRTHTGEKPYKCNECGKTFCEKSALTKHQRTHTGEKPYECNACGKTFSQRSVLTKHQRIHTRVKALSTS

SEQ ID NO: 5734 - protein, 417 aa, Homo Sapiens
MAVETTVHTHLSASPPQGSPYDHTPGMAGSLGYHPYAAPLGSYPYGDPAYRKNATRDATATLKAWLNEHRKNPYPTKGEKIMLAIITKMTLTQVSTWFANARRRLKKENKMTWTPRNRSEDEEEEENIDLEKNDEDEPQKPEDKGDPEGPEAGGAEQKAASGCERLQGPPTPAGKETEGSLSDSDFKEPPSEGRLDALQGPPRTGGPSPAGPAAARLAEDPAPHYPAGAPAPGPHPAAGEVPPGPGGPSVIHSPPPPPPPAVLAKPKLWSLAEIATLSDKVKDGGGGNEGSPCPPCPGPIAGQALGGSRASPAPAPSRSPSAQCPFPGGTVLSRPLYYTAPFYPGYTNYGSFGHLHGHPGPGPGPTTGPGSHFNGLNQTVLNRADALAKDPKMLRSQSQLDLCKDSPYELKKGMSDI

SEQ ID NO: 5735 - protein, 342 aa, Homo Sapiens
MVQASGHRRSTRGSKMVSWSVIAKIQEILQRKMVREFLAEFMSTYVMMVFGLGSVAHMVLNKKYGSYLGVNLGFGFGVTMGVHVAGRISGAHMNAAVTFANCALGRVPWRKFPVYVLGQFLGSFLAAATIYSLFYTAILHFSGGQLMVTGPVATAGIFATYLPDHMTLWRGFLNEAWLTGMLQLCLFAITDQENNPALPGTEALVIGILVVIIGVSLGMNTGYAINPSRDLPPRIFTFIAGWGKQVFSNGENWWWVPVVAPLLGAYLGGIIYLVFIGSTIPREPLKLEDSVAYEDHGITVLPKMGSHEPTISPLTPVSVSPANRSSVHPAPPLHESMALEHF

SEQ ID NO: 5736 - protein, 952 aa, Homo Sapiens
MNLCGLMPIFPAPLDQVADMEELTIWEQHTATLSKDPRRGFGIAISGGRDRPGGSMVVSDVVPGGPAEGRLQTGDHIVMVNGVSMENATSAFAIQILKTCTKMANITVKRPRRIHLPATKASPSSPGRQDSDEDDGPQRVEEVDQGRGYDGDSSSGSGRSWDERSRRPRPGRRGRAGSHGRRSPGGGSEANGLALVSGFKRLPRQDVQMKPVKSVLVKRRDSEEFGVKLGSQIFIKHITDSGLAARHRGLQEGDLILQINGVSSQNLSLNDTRRLIEKSEGKLSLLVLRDRGQFLVNIPPAVSDSDSSPLEEGVTMADEMSSPPADISDLASELSQAPPSHIPPPPRHAQRSPEASQTDSPVESPRLRRESSVDSRTISEPDEQRSELPRESSYDIYRVPSSQSMEDRGYSPDTRVVRFLKGKSIGLRLAGGNDVGIFVSGVQAGSPADGQGIQEGDQILQVNDVPFQNLTREEAVQFLLGLPPGEEMELVTQRKQDIFWKMVQSRVGDSFYIRTHFELEPSPPSGLGFTRGDVFHVLDTLHPGPGQSHARGGHWLAVRMGRDLREQERGIIPNQSRAEQLASLEAAQRAVGVGPGSSAGSNARAEFWRLRGLRRGAKKTTQRSREDLSALTRQGRYPPYERVVLREASFKRPVVILGPVADIAMQKLTAEMPDQFEIAETVSRTDSPSKIIKLDTVRVIAEKDKHALLDVTPSAIERLNYVQYYPIVVFFIPESRPALKALRQWLAPASRRSTRRLYAQAQKLRKHSSHLFTATIPLNGTSDTWYQELKAIIREQQTRPIWTAEDQLDGSLEDNLDLPHHGLADSSADLSCDSRVNSDYETDGEGGAYTDGEGYTDGEGGPYTDVDDEPPAPALARSSEPVQADESQSPRDRGRISAHQGAQVDSRHPQGQWRQDSMRTYEREALKKKFMRVHDAESSDEDGYDWGPATDL

SEQ ID NO: 5737 - protein, 1223 aa, Homo Sapiens
TRRLHWPSNQPTQLVSSCFGGELLQWDLTQSWRRKYTLFSASSEGQNHSRIVFNLCPLQTEDDKQLLLSTSMDRDVKCWDIATLECSWTLPSLGGFAYSLAFSSVDIGSLAIGVGDGMIRVWNTLSIKNNYDVKNFWQGVKSKVTALCWHPTKEGCLAFGTDDGKVGLYDTYSNKPPQISSTYHKKTVYTLAWGPPVPPMSLGGEGDRPSLALYSCGGEGIVLQHNPWKLSGEAFDINKLIRDTNSIKYKLPVHTEISWKADGKIMALGNEDGSIEIFQIPNLKLICTIQQHHKLVNTISWHHEHGSQPELSYLMASGSNNAVIYVHNLKTVIESSPESPVTITEPYRTLSGHTAKITSVAWSPHHDGRLVSASYDGTAQVWDALREEPLCNFRGHQGRLLCVAWSPLDPDCIYSGADDFCVHKWLTSMQDHSRPPQGKKSIELEKKRLSQPKAKPKKKKKPTLRTPVKLESIDGNEEESMKENSGPVENGVSDQEGEEQAREPELPCGLAPAVSREPVICTPVSSGFEKSKVTINNKVILLKKEPPKEKPETLIKKRKARSLLPLSTSLDHRSKEELHQDCLVLATAKHSRELNEDVSADVEERFHLGLFTDRATLYRMIDIEGKGHLENGHPELFHQLMLWKGDLKGVLQTAAERGELTDNLVAMAPAAGYHVWLWAVEAFAKQLCFQDQYVKAASHLLSIHKVYEAVELLKSNHFYREAIAIAKARLRPEDPVLKDLYLSWGTVLERDGHYAVAAKCYLGATCAYDAAKVLAKKGDAASLRTAAELAAIVGEDELSASLALRCAQELLLANNWVGAQEALQLHESLQGQRLVFCLLELLSRHLEEKQLSEGKSSSSYHTWNTGTEGPFVERVTAVWKSIFSLDTPEQYQEAFQKLQNIKYPSATNNTPAKQLLLHICHDLTLAVLSQQMASWDEAVQALLRAVVRSYDSGSFTIMQEVYSAFLPDGCDHLRDKLGDHQSPATPAFKSLEAFFLYGRLYEFWWSLSRPCPNSSVWVRAGHRTLSVEPSQQLDTASTEETDPETSQPEPNRPSELDLRLTEEGERMLSTFKELFSEKHASLQNSQRTVAEVQETLAEMIRQHQKSQLCKSTANGPDKNEPEVEAEQPLCSSQSQCKEEKNEPLSLPELTKRLTEANQRMAKFPESIKAWPFPDVLECCLVLLLIRSHFPGCLAQEMQQQAQELLQKYGNTKTYRRHCQTFCM

SEQ ID NO: 5738 - protein, 703 aa, Homo Sapiens
MTAVGRRCPALGSRGAAGEPEAGSDYVKFSKEKYILDSSPEKLHKELEEELKLSSTDLRSHAWYHGRIPREVSETLVQRNGDFLIRDSLTSLGDYVLTCRWRNQALHFKINKVVVKAGESYTHIQYLFEQESFDHVPALVRYHVGSRKAVSEQSGAIIYCPVNRTFPLRYLEASYGLGQGSSKPASPVSPSGPKGSHMKRRSVTMTDGLTADKVTRSDGCPTSTSLPRPRDSIRSCALSMDQIPDLHSPMSPISESPSSPAYSTVTRVHAAPAAPSATALPASPVARCSSEPQLCPGSAPKTHGESDKGPHTSPSHTLGKASPSPSLSSYSDPDSGHYCQLQPPVRGSREWAATETSSQQARSYGERLKELSENGAPEGDWGKTFTVPIVEVTSSFNPATFQSLLIPRDNRPLEVGLLRKVKELLAEVDARTLARHVTKVDCLVARILGVTKEMQTLMGVRWGMELLTLPHGRQLRLDLLERFHTMSIMLAVDILGCTGSAEERAALLHKTIQLAAELRGTMGNMFSFAAVMGALDMAQISRLEQTWVTLRQRHTEGAILYEKKLKPFLKSLNEGKEGPPLSNTTFPHVLPLITLLECDSAPPEGPEPWGSTEHGVEVVLAHLEAARTVAHHGGLYHTNAEVKLQGFQARPELLEVFSTEFQMRLLWGSQGASSSQARRYEKFDKVLTALSHKLEPAVRSSEL

SEQ ID NO: 5739 - protein, 3908 aa, Homo Sapiens [sequence omitted]

SEQ ID NO: 5740 - protein, 297 aa, Homo Sapiens
MGTALDIKIKRANKVYHAGEVLSGVVVISSKDSVQHQGVSLTMEGTVNLQLSAKSVGVFEAFYNSVKPIQIINSTIEMVKPGKFPSGKTEIPFEFPLHLKGNKVLYETYHGVFVNIQYTLRCDMKRSLLAKDLTKTCEFIVHSAPQKGKFTPSPVDFTITPETLQNVKERALLPKFLLRGHLNSTNCVITQPLTGELVVESSEAAIRSVELQLVRVETCGCAEGYARDATEIQNIQIADGDVCRGLSVPIYMVFPRLFTCPTLETTNFKVEFEVNIVVLLHPDHLITENFPLKLCRI

SEQ ID NO: 5741 - protein, 1209 aa, Homo Sapiens [sequence omitted]

SEQ ID NO: 5742 - protein, 307 aa, Homo Sapiens [sequence omitted]

SEQ ID NO: 5743 - protein, 713 aa, Homo Sapiens
MRLLVAPLLLAWVAGATAAVPVVPWHVPCPPQCACQIRPWYTPRSSYREATTVDCNDLFLTAVPPALPAGTQTLLLQSNSIVRVDQSELGYLANLTELDLSQNSFSDARDCDFHALPQLLSLHLEENQLTRLEDHSFAGLASLQELYLNHNQLYRIAPRAFSGLSNLLRLHLNSNLLRAIDSRWFEMLPNLEILMIGGNKVDAILDMNFRPLANLRSLVLAGMNLREISDYALEGLQSLESLSFYDNQLARVPRRALEQVPGLKFLDLNKNPLQRVGPGDFANMLHLKELGLNNMEELVSIDKFALVNLPELTKLDITNNPRLSFIHPRAFHHLPQMETLMLNNNALSALHQQTVESLPNLQEVGLHGNPIRCDCVIRWANATGTRVRFIEPQSTLCAEPPDLQRLPVREVPFREMTDHCLPLISPRSFPPSLQVASGESMVLHCRALAEPEPEIYWVTPAGLRLTPAHAGRRCRVYPEGTLELRRVTAEEAGLYTCVAQNLVGADTKTVSVVVGRALLQPGRDEGQGLELRVQETHPYHILLSWVTPPNTVSTNLTWSSASSLRGQGATALARLPRGTHSYNITRLLQATEYWACLQVAFADAHTQLACVWARTKEATSCHRALGDRPGLIAILALAVLLLAAGLAAHLGTGQPRKGVGGRRPLPPAWAFWGWSAPSVRVVSAPLVLPWNPGRKLPRSSEGETLLPPLSQNS

SEQ ID NO: 5744 - protein, 934 aa, Homo Sapiens
SAGGGVAEQAAPQSPPRPRAAPPRGLPARGAEGAAPRPTCPTWGTPGPGVLVTMTTETGPDSEVKKAQEEAPQQPEAAAAVTTPVTPAGHGHPEANSNEKHPSQQDTRPAEQSLDMEEKDYSEADGLSERTTPSKAQKSPQKIAKKYKSAICRVTLLDASEYECEVEKHGRGQVLFDLVCEHLNLLEKDYFGLTFCDADSQKNWLDPSKEIKKQIRSSPWNFAFTVKFYPPDPAQLTEDITRYYLCLQLRADIITGRLPCSFVTHALLGSYAVQAELGDYDAEEHVGNYVSELRFAPNQTRELEERIMELHKTYRGMTPGEAEIHFLENAKKLSMYGVDLHHAKDSEGIDIMLGVCANGLLIYRDRLRINRFAWPKILKISYKRSNFYIKIRPGEYEQFESTIGFKLPNHRSAKRLWKVCIEHHTFFRLVSPEPPPKGFLVMGSKFRYSGRTQAQTRQASALIDRPAPFFERSSSKRYTMSRSLDGAEFSRPASVSENHDAGPDGDKRDEDGESGGQRSEAEEGEVRTPTKIKELKPEQETTPRHKQEFLDKPEDVLLKHQASINELKRTLKEPNSKLIHRDRDWERERRLPSSPASPSPKGTPEKANERAGLREGSEEKVKPPRPRAPESDTGDEDQDQERDTVFLKDNHLAIERKCSSITVSSTSSLEAEVDFTVIGDYHGSAFEDFSRSLPELDRDKSDSDTEGLLFSRDLNKGAPSQDDESGGIEDSPDRGACSTPDMPQFEPVKTETMTVSSLAIRKKIEPEAVLQTRVSAMDNTQQVDGSASVGREFIATTPSITTETISTTMENSLKSGKGAAAMIPGPQTVATEIRSLSPIIGKDVLTSTYGATAETLSTSTTTHVTKTVKGGFSETRIEKRIIITGDEDVDQDQALALAIKEAKLQHPDMLVTKAVVYRETDPSPEERDKKPQES

SEQ ID NO: 5745 - protein, 425 aa, Homo Sapiens
MGEDAAQAEKFQHPGSDMRQEKPSSPSPMPSSTPSPSLNLGNTEEAIRDNSQVNAVTVLTLLDKLVNMLDAVQENQHKMEQRQISLEGSVKGIQNDLTKLSKYQASTSNTVSKLLEKSRKVSAHTRAVKERMDRQCAQVKRLENNHAQLLRRNHFKVLIFQEENEIPASVFVKQPVSGAVEGKEELPDENKSLEETLHTVDLSSDDDLPHDEEALEDSAEEKVEESRAEKIKRSSLKKVDSLKKAFSRQNIEKKMNKLGTKIVSVERREKIKKSLTSNHQKISSGKSSPFKVSPLTFGRKKVREGESHAENETKSEDLPSSEQMPNDQEEESFAEGHSEASLASALVEGEIAEEAAEKATSRGSNSGMDSNIDLTIVEDEEEESVALEQAQKVRYEGSYALTSEEAERSDGDPVQPAVLQVHQTS

SEQ ID NO: 5746 - protein, 175 aa, Homo Sapiens
MQLTHQLDLFPECRVTLLLFKDVKNAGDLRRKAMEGTIDGSLINPTVIVDPFQILVAANKAVHLYKLGKMKTRTLSTEIIFNLSPNNNISEALKKFGISANDTSILIVYIEEGEKQINQEYLISQVEGHQVSLKNLPEIMNITEVKKIYKLSSQEESIGTLLDAIICRMSTKDVL

SEQ ID NO: 5747 - protein, 378 aa, Homo Sapiens
MRRLNRKKTLSLVKELDAFPKVPESYVETSASGGTVSLIAFTTMALLTIMEFSVYQDTWMKYEYEVDKDFSSKLRINIDITVAMKCQYVGADVLDLAETMVASADGLVYEPTVFDLSPQQKEWQRMLQLIQSRLQEEHSLQDVIFKSAFKSTSTALPPREDDSSQSPNACRIHGHLYVNKVAGNFHITVGKAIPHPRGHAHLGSTCQPWNLTIFSHRIDHLSFGELVPAIINPLDGTEKIAIDHNQMFQYFITVVPTKLHTYKISADTHQFSVTERERIINHAAGSHGVSGIFMKYDLSSLMVTVTEEHMPFWQFFVRLCGIVGGIFSTTGMLHGIGKFIVEIICCRFRLGSYKPVNSVPFEDGHTDNHLPLLENNTH

SEQ ID NO: 5748 - protein, 775 aa, Homo Sapiens
MEPPYSLTAHYDEFQEVKYVSRCGAGGARGASLPPGFPLGAARSATGARSGLPRWNRREVCLLSGLVFAAGLCAILAAMLALKYLGPVAAGGGACPEGCPERKAFARAARFLAANLDASIDPCQDFYSFACGGWLRRHAIPDDKLTYGTIAAIGEQNEERLRRLLARPGGGPGGAAQRKVRAFFRSCLDMREIERLGPRPMLEVIEDCGGWDLGGAEERPGVAARWDLNRLLYKAQGVYSAAALFSLTVSLDDRNSSRYVIRIDQDGLTLPERTLYLAQDEDSEKVLAAYRVFMERVLSLLGADAVEQKAQEILQVEQQLANITVSEYDDLRRDVSSMYNKVTLGQLQKITPHLRWKWLLDQIFQEDFSEEEEVVLLATDYMQQVSQLIRSTPHRVLHNYLVWRVVVVLSEHLSPPFREALHELAQEMEGSDKPQELARVCLGQANRHFGMALGALFVHEHFSAASKAKVQQLVEDIKYILGQRLEELDWMDAETRAAARAKLQYMMVMVGYPDFLLKPDAVDKEYEFEVHEKTYFKNILNSIRFSIQLSVKKIRQEVDKSTWLLPPQALNAYYLPNKNQMVFPAGILQPTLYDPDFPQSLNYGGIGTIIGHELTHGYDDWGGQYDRSGNLLHWWTEASYSRFLRKAECIVRLYDNFTVYNQRVNGKHTLGENIADMGGLKLAYHAYQKWVREHGPEHPLPRLKYTHDQLFFIAFAQNWCIKRRSQSIYLQVLTDKHAPEHYRVLGSVSQFEEFGRVLHCPKVSPMNPAHKCSVW

SEQ ID NO: 5749 - protein, 2390 aa, Homo Sapiens
MSSTLSPTDFDSLEIQGQYSDINNRWDLPDSDWDNDSSSARLFERSRIKALADEREAVQKKTFTKWVNSHLARVTCRVGDLYSDLRDGRNLLRLLEVLSGEILPKPTKGRMRIHCLENVDKALQFLKEQKVHLENMGSHDIVDGNHRLTLGLVWTIILRFQIQDISVETEDNKEKKSAKDALLLWCQMKTAGYPNVNVHNFTTSWRDGLAFNAIVHKHRPDLLDFESLKKCNAHYNLQNAFNLAEKELGLTKLLDPEDVNVDQPDEKSIITYVATYYHYFSKMKALAVEGKRIGKVLDHAMEAERLVEKYESLASELLQWIEQTIVTLNDRQLANSLSGVQNQLQSFNSYRTVEKPPKFTEKGNLEVLLFTIQSKLRANNQKVYTPREGRLISDINKAWERLEKAEHERELALRTELIRQEKLEQLAARFDRKAAMRETWLSENQRLVSQDNFGLELAAVEAAVRKHEAIETDIVAYSGRVQAVDAVAAELAAERYHDIKRIAARQHNVARLWDFLRQMVAARRERLLLNLELQKVFQDLLYLMDWMEEMKGRLQSQDLGRHLAGVEDLLQLHELVEADIAVQAERVRAVSASALRFCNPGKEYRPCDPQLVSERVAKLEQSYEALCELAAARRARLEESRRLWRFLWEVGEAEAWVREQQHLLASADTGRDLTGALRLLNKHTALRGEMSGRLGPLKLTLEQGQQLVAEGHPGASQASARAAELQAQWERLEALAEERAQRLAQAASLYQFQADANDMEAWLVDALRLVSSPELGHDEFSTQALARQHRALEEEIRSHRPTLDALREQAAALPPTLSRTPEVQGRVPTLERHYEELQARAGERARALEAALALYTMLSEAGACGLWVEEKEQWLNGLALPERLEDLEVVQQRFETLEPEMNTLAAQITAVNDIAEQLLKANPPGKDRIVNTQEQLNHRWQQFRRLADGKKAALTSALSIQNYHLECTETQAWMREKTKVIESTQGLGNDLAGVLALQRKLAGTERDLEAIAARVGELTREANALAAGHPAQAVAINARLREVQTGWEDLRATMRRREESLGEARRLQDFLRSLDDFQAWLGRTQTAVASEEGPATLPEAEALLAQHAALRGEVERAQSEYSRLRALGEEVTRDQADPQCLFLRQRLEALGTGWEELGRMWESRQGRLAQAHGFQGFLRDARQAEGVLSSQEYVLSHTEMPGTLQAADAAIKKLEDFMSTMDANGERIHGLLEAGRQLVSEGNIHADKIREKADSIERRHKKNQDAAQQFLGRLRDNREQQHFLQDCHELKLWIDEKMLTAQDVSYDEARNLHTKWQKHQAFMAELAANKDWLDKVDKEGRELTLEKPELKALVSEKLRDLHRRWDELETTTQAKARSLFDANRAELFAQSCCALESWLESLQAQLHSDDYGKDLTSVNILLKKQQMLEWEMAVREKEVEAIQAQAKALAQEDQGAGEVERTSRAVEEKFRALCQPMRERCRRLQASREQHQFHRDVEDEILWVTERLPMASSMEHGKDLPSVQLLMKKNQTLQKEIQGHEPRIADLRERQRALGAAAAGPELAELQEMWKRLGHELELRGKRLEDALRAQQFYRDAAEAEAWMGEQELHMMGQEKAKDELSAQAEVKKHQVLEQALADYAQTIHQLAASSQDMIDHEHPESTRISIRQAQVDKLYAGLKELAGERRERLQEHLRLCQLRRELDDLEQWIQEREVVAASHELGQDYEHVTMLRDKFREFSRDTSTIGQERVDSANALANGLIAGGHAARATVAEWKDSLNEAWADLLELLDTRGQVLAAAYELQRFLHGARQALARVQHKQQQLPDGTGRDLNAAEALQRRHCAYEHDIQALSPQVQQVQDDGHRLQKAYAGDKAEEIGRHMQAVAEAWAQLQGSSAARRQLLLDTTDKFRFFKAVRELMLWMDEVNLQMDAQERPRDVSSADLVIKNQQGIKAEIEARADRFSSCIDMGKELLARSHYAAEEISEKLSQLQARRQETAEKWQEKMDWLQLVLEVLVFGRDAGMAEAWLCSQEPLVRSAELGCTVDEVESLIKRHEAFQKSAVAWEERFCALEKLTALEEREKERKRKREEEERRKQPPAPEPTASVPPGDLVGGQTASDTTWDGTQPRPPPSTQAPSVNGVCTDGEPSQPLLGQQRLEHSSFPEGPGPGSGDEANGPRGERQTRTRGPAPSAMPQSRSTESAHAATLPPRGPEPSAQEQMEGMLCRKQEMEAFGKKAANRSWQNVYCVLRRGSLGFYKDAKAASAGVPYHGEVPVSLARAQGSVAFDYRKRKHVFKLGLQDGKEYLFQAKDEAEMSSWLRVVNAAIATASSASGEPEEPVVPSTTRGMTRAMTMPPVSPVGAEGPVVLRSKDGREREREKRFSFFKKNK

SEQ ID NO: 5750 - protein, 595 aa, Homo Sapiens
DGRQVCRKPSERGLEDLATLSSPSGSPGPPPEHSGAMDSPGYNCFVDKDKMDAAIQDLGPKELSCTELQELKQLARQGYWAQSHALRGKVYQRLIRDIPCRTVTPDASVYSDIVGKIVGKHSSSCLPLPEFVDNTQVPSYCLNARGEGAVRKILLCLANQFPDISFCPALPAVVALLLHYSIDEAECFEKACRILACNDPGRRLIDQSFLAFESSCMTFGDLVNKYCQAAHKLMVAVSEDVLQVYADWQRWLFGELPLCYFARVFDVFLVEGYKVLYRVALAILKFFHKVRAGQPLESDSVKQDIRTFVRDIAKTVSPEKLLEKAFAIRLLSRKEIQLLQMANEKALKQKGITVKQKSVSLSKRQFVHLAVHAENFRSEIVSVREMRDIWSWVPERFALCQPLLLFSSLQHGYSLARFYFQCEGHEPTLLLIKTTQKEVCGAYLSTDWSERNKFGGKLGFFGTGECFVFRLQPEVQRYEWVVIKHPELTKPPPLMAAEPTAPLSHSASSDPADRLSPFLAARHFNLPSKTESMFMAGGSDCLIVGGGGGQALYIDGDLNRGRTSHCDTFNNQPLCSENFLIAAVEAWGFQDPDTQ

SEQ ID NO: 5751 - protein, 366 aa, Homo Sapiens
MAGPRVEVDGSIMEGGGQILRVSTALSCLLGLPLRVQKIRAGRSTPGLRPQHLSGLEMIRDLCDGQLEGAEIGSTEITFTPEKIKGGIHTADTKTAGSVCLLMQVSMPCVLFAASPSELHLKGGTNAEMAPQIDYTVMVFKPIVEKFGFIFNCDIKTRGYYPKGGGEVIVRMSPVKQLNPINLTERGCVTKIYGRAFVAGVLPFKVAKDMAAAAVRCIRKEIRDLYVNIQPVQEPKDQAFGNGNGIIIIAETSTGCLFAGSSLGKRGVNADKVGIEAAEMLLANLRHGGTVDEYLQDQLIVFMALANGVSRIKTGPVTLHTQTAIHFAEQIAKAKFIVKKSEDEEDAAKDTYIIECQGIGMTNPNL

SEQ ID NO: 5752 - protein, 709 aa, Homo Sapiens
MPGIDKLPIEETLEDSPQTRSLLGVFEEDATAISNYMNQLYQAMHRIYDAQNELSAATHLTSKLLKEYEKQRFPLGGDDEVMSSTLQQFSKVIDELSSCHAVLSTQLADAMMFPITQFKERDLKEILTLKEVFQIASNDHDAAINRYSRLSKKRENDKVKYEVTEDVYTSRKKQHQTMMHYFCALNTLQYKKKIALLEPLLGYMQAQISFFKMGSENLNEQLEEFLANIGTSVQNVRREMDSDIETMQQTIEDLEVASDPLYVPDPDPTKFPVNRNLTRKAGYLNARNKTGLVSSTWDRQFYFTQGGNLMSQARGDVAGGLAMDIDNCSVMAVDCEDRRYCFQITSFDGKKSSILQAESKKDHEEWICTINNISKQIYLSENPEETAARVNQSALEAVTPSPSFQQRHESLRPAAGQSRPPTARTSSSGSLGSESTNLAALSLDSLVAPDTPIQFDIISPVCEDQPGQAKAFGQGGRRTNPFGESGGSTKSETEDSILHQLFIVRFLGSMEVKSDDHPDVVYETMRQILAARAIHNIFRMTESHLLVTCDCLKLIDPQTQVTRLTFPLPCVVLYATHQENKRLFGFVLRTSSGRSESNLSSVCYIFESNNEGEKICDSVGLAKQIALHAELDRRASEKQKEIERVKEKQQKELNKQKQIEKDLEEQSRLIAASSRPNQASSEGQFVVLSSSQSEESDLGEGGKKRESEA

SEQ ID NO: 5753 - protein, 333 aa, Homo Sapiens
QEVLFHGGSSFTVLRCTSFALESCAHPDRHYSLADLLKYNFYLPFFFFGPIMTFDRFHAQVSQVEPVRREGELWHIRAQAGLSVVAIMAVDIFFHFFYILTIPSDLKFANRLPDSALAGLAYSNLVYDWVKAAVLFGVVNTVACLDHLDPPQPPKCITALYVFAETHFDRGINDWLCKYVYNHIGGEHSAVIPELAATVATFAITTLWLGPCDIVYLWSFLNCFGLNFELWMQKLAEWGPLARIEASLSVQMSRRVRALFGAMNFWAIIMYNLVSLNSLKFTELVARRLLLTGFPQTTLSILFVTYCGVQLVKERERTLALEEEQKQDKEKPE

SEQ ID NO: 5754 - protein, 1353 aa, Homo Sapiens
TGEAGGPPSTREAELKLRLKLVEEEANILGRKIVELEVENRGLKAEMEDTRGQQEREGPGRDHAPSIPTSPFGDSLESSTELRRHLQFVEEEAELLRRSISEIEDHNRQLTHELSKFKFEPPREPGWLGEGASPGAGGGAPLQEELKSARLQISELSGKVLKLQHENHALLSNIQRCDLAAHLGLRAPSPRDSDAESDAGKKESDGEESRLPQPKREGPVGGESDSEEMFEKTSGFGSGKPSEASEPCPTELLKAREDSEYLVTLKHEAQRLERTVERLITDTDSFLHDAGLRGGAPLPGPGLQGEEEQGEGDQQEPQLLGTINAKMKAFKKELQAFLEQVNRIGDGLSPLPHLTESSSFLSTVTSVSRDSPIGNLGKELGPDLQSRLKEQLEWQLGPARGDERESLRLRAARELHRRADGDTGSHGLGGQTCFSLEMEEEHLYALRWKELEMHSLALQNTLHERTWSDEKNLMQQELRSLKQNIFLFYVKLRWLLKHWRQGKQMEEEGEEFTEGEHPETLSRLGELGVQGGHQADGPDHDSDRGCGFPVGEHSPHSRVQIGDHSLRLQTADRGQPHKQVVENQQLFSAFKALLEDFRAELREDERARLRLQQQYASDKAAWDVEWAVLKCRLEQLEEKTENKLGELGSSAESKGALKKEREVHQKLLADSHSLVMDLRWQIHHSEKNWNREKVELLDRLDRDRQEWERQKKEFLWRIEQLQKENSPRRGGSFLCDQKDGNVRPFPHQGSLRMPRPVAMWPCADADSIPFEDRPLSKLKESDRCSASENLYLDALSLDDEPEEPPAHRPEREFRNRLPEEEENHKGNLQRAVSVSSMSEFQRLMDISPFLPEKGLPSTSSKEDVTPPLSPDDLKYIEEFNKSWDYTPNRGHNGGGPDLWADRTEVGRAGHEDSTEPFPDSSWYLTTSVTMTTDTMTSPEHCQKQPLRSHVLTEQSGLRVLHSPPAVRRVDSITAAGGEGPFPTSRARGSPGDTKGGPPEPMLSRWPCTSPRHSRDYVEGARRPLDSPLCTSLGFASPLHSLEMSKNLSDDMKEVAFSVRNAICSGPGELQVKDMACQTNGSRTMGTQTVQTISVGLQTEALRGSGVTSSPHKCLTPKAGGGATPVSSPSRSLRSRQVAPAIEKVQAKFERTCCSPKYGSPKLQRKPLPKADQPNNRTSPGMAQKGYSESAWARSTTTRESPVHTTINDGLSSLFNIIDHSPVVQDPFQKGLRAGSRSRSAEPRPELGPGQETGTNSRGRSPSPIGVGSEMCREEGGEGTPVKQDLSAPPGYTLTENVARILNKKLLEHALKEERRQAAHGPPGLHSDSHSLGDTAEPGPMENQTVLLTAPWGL

SEQ ID NO: 5755 - protein, 601 aa, Homo Sapiens
NADFLSLRQTELPGNSCAQDPASFMPPQQPCSFPSQSLSDAESISKHMSLSYVANQEPGILQQKNAVQIISSALDTDNESTKDTENTFVLGDVQKTDAFVPVYSDSTIQEASPNFEKAYTLPVLPSEKDFNGSDASTQLNTHYAFSKLTYKSSSGHEVENSTTDTQVISHEKENKLESLVLTHLSRCDSDLCEMNAGMPKGNLNEQDPKHCPESEKCLLSIEDEESQQSILSSLENHSQQSTQPEMHKYGQLVKVELEENAEDDKTENQIPQRMTRNKANTMANQSKQILASCTLLSEKDSESSSPRGRIRLTEDDDPQIHHPRKRKVSRVPQPVQVSPSLLQAKEKTQQSLAAIVDSLKLDEIQPYSSERANPYFEYLHIRKKIEEKRKLLCSVIPQAPQYYDEYVTFNGSYLLDGNPLSKICIPTITPPPSLSDPLKELFRQQEVVRMKLRLQHSIEREKLIVSNEQEVLRVHYRAARTLANQTLPFSACTVLLDAEVYNVPLDSQSDDSKTSVRDRFNARQFMSWLQDVDDKFDKLKTCLLMRQQHEAAALNAVQRLEWQLKLQELDPATYKSISIYEIQEFYVPLVDVNDDFELTPI

SEQ ID NO: 5756 - protein, 439 aa, Homo Sapiens
MAAARCWRPLLRGPRLSLHTAANAAATATETTSQDVAATPVARYPPIVASMTADSKAARLRRIERWQATVHAAESVDEKLRILTKMQFMKYMVYPQTFALNADRWYQYFTKTVFLSGLPPPPAEPEPEPEPEPEPALDLAALRAVACDCLLQEHFYLRRRRRVHRYEESEVISLPFLDQLVSTLVGLLSPHNPALAAAALDYRCPVHFYWVRGEEIIPRGHRRGRIDDLRYQIDDKPNNQIRISKQLAEFVPLDYSVPIEIPTIKCKPDKLPLFKRQYENHIFVGSKTADPCCYGHTQFHLLPDKLRRERLLRQNCADQIEVVFRANAIASLFAWTGAQAMYQGFWSEADVTRPFVSQAVITDGKYFSFFCYQLNTLALTTQADQNNPRKNICWGTQSKPLYETIEDNDVKGFNDDVLLQIVHFLLNRPKEEKSQLLEN

SEQ ID NO: 5757 - protein, 538 aa, Homo Sapiens [sequence omitted]

SEQ ID NO: 5758 - protein, 497 aa, Homo Sapiens
MDPLGAPSQFVDVDTLPSWGDSCQDELNSSDTTAEIFQEDTVRSPFLYNKDVNGKVVLWKGDVALLNCTAIVNTSNESLTDKNPVSESIFMLAGPDLKEDLQKLKGCRTGEAKLTKGFNLAARFIIHTVGPKYKSRYRTAAESSLYSCYRNVLQLAKEQSMSSVGFCVINSAKRGYPLEDATHIALRTVRRFLEIHGETIEKVVFAVSDLEEGTYQKLLPLYFPRSLKEENRSLPYLPADIGNAEGEPVVPERQIRISEKPGAPEDNQEEEDEGLGVDLSFIGSHAFARMEGDIDKQRKLILQGQLSEAALQKQHQRNYNRWLCQARSEDLSDIASLKALYQTGVDNCGRTVMVVVGRNIPVTLIDMDKALLYFIHVMDHIAVKEYVLVYFHTLTSEYNHLDSDFLKKLYDVVDVKYKRNLKAVYFVHPTFRSKVSTWFFTTFSVSGLKDKIHHVDSLHQLFSAISPEQIDFPPFVLEYDARENGPYYTSYPPSPDL

SEQ ID NO: 5759 - protein, 227 aa, Homo Sapiens
MRVAGAAKLVVAVAVFLLTFYVISQVFEIKMDASLGNLFARSALDTAARSTKPPRYKCGISKACPEKHFAFKMASGAANVVGPKICLEDNVLMSGVKNNVGRGINVALANGKTGEVLDTKYFDMWGGDVAPFIEFLKAIQDGTIVLMGTYDDGATKLNDEARRLIADLGSTSITNLGFRDNWVFCGGKGIKTKSPFEQHIKNNKDTNKYEGWPEVVEMEGCIPQKQD

SEQ ID NO: 5760 - protein, 1502 aa, Homo Sapiens
REIACIQKDKDIPAEDIICEYFEPKPLLEQACLIPCQQDCIVSEFSAWSECSKTCGSGLQHRTRHVVAPPQFGGSGCPNLTEFQVCQSSPCEAEELRYSLHVGPWSTCSMPHSRQVRQARRRGKNKEREKDRSKGVKDPEARELIKKKRNRNRQNRQENKYWDIQIGYQTREVMCINKTGKAADLSFCQQEKLPMTFQSCVITKECQVSEWSEWSPCSKTCHDMVSPAGTRVRTRTIRQFPIGSEKECPEFEEKEPCLSQGDGVVPCATYGWRTTEWTECRVDPLLSQQDKRRGNQTALCGGGIQTREVYCVQANENLLSQLSTHKNKEASKPMDLKLCTGPIPNTTQLCHIPCPTECEVSPWSAWGPCTYENCNDQQGKKGFKLRKRRITNEPTGGSGVTGNCPHLLEAIPCEEPACYDWKAVRLGDCEPDNGKECGPGTQVQEVVCINSDGEEVDRQLCRDAIFPIPVACDAPCPKDCVLSTWSTWSSCSHTCSGKTTEGKQIRARSILAYAGEEGGIRCPNSSALQEVRSCNEHPCTVYHWQTGPWGQCIEDTSVSSFNTTTTWNGEASCSVGMQTRKVICVRVNVGQVGPKKCPESLRPETVRPCLLPCKKDCIVTPYSDWTSCPSSCKEGDSSIRKQSRHRVIIQLPANGGRDCTDPLYEEKACEAPQACQSYRWKTHKWRRCQLVPWSVQQDSPGAQEGCGPGRQARAITCRKQDGGQAGIHECLQYAGPVPALTQACQIPCQDDCQLTSWSKFSSCNGDCGAVRTRKRTLVGKSKKKEKCKNSHLYPLIETQYCPCDKYNAQPVGNWSDCILPEGKVEVLLGMKVQGDIKECGQGYRYQAMACYDQNGRLVETSRCNSHGYIEEACIIPCPSDCKLSEWSNWSRCSKSCGSGVKVRSKWLREKPYNGGRPCPKLDHVNQAQVYEVVPCHSDCNQYLWVTEPWSICKVTFVNMRENCGEGVQTRKVRCMQNTADGPSEHVEDYLCDPEEMPLGSRVCKLPCPEDCVISEWGPWTQCVLPCNQSSFRQRSADPIRQPADEGRSCPNAVEKEPCNLNKNCYHYDYNVTDWSTCQLSEKAVCGNGIKTRMLDCVRSDGKSVDLKYCEALGLEKNWQMNTSCMVECPVNCQLSDWSPWSECSQTCGLTGKMIRRRTVTQPFQGDGRPCPSLMDQSKPCPVKPCYRWQYGQWSPCQVQEAQCGEGTRTRNISCVVSDGSADDFSKVVDEEFCADIELIIDGNKNMVLEESCSQPCPGDCYLKDWSSWSLCQLTCVNGEDLGFGGIQVRSRPVIIQELENQHLCPEQMLETKSCYDGQCYEYKWMASAWKGSSRTVWCQRSDGINVTGGCLVMSQPDADRSCNPPCSQPHSYCSETKTCHCEEGYTEVMSSNSTLEQCTLIPVVVLPTMEDKRGDVKTSRAVHPTQPSSNPAGRGRTWFLQPFGPDGRLKTWVYGVAAGAFVLLIFIVSMIYLACKKPKKPQRRQNNRLKPLTLAYDGDADM

SEQ ID NO: 5761 - protein, 533 aa, Homo Sapiens
MARLPAGIRFIISFSRDQWYRAFIFILTFLLYASFHLSRKPISIVKGELHKYCTAWDEADVRFSSQNRKSGSAAPHQLPDNETDCGWAPFDKNNYQQLLGALDYSFLCAYAVGMYLSGIIGERLPIRYYLTFGMLASGAFTALFGLGYFYNIHSFGFYVVTQVINGLVQTTGWPSVVTCLGNWFGKGRRGLIMGVWNSHTSVGNILGSLIAGYWVSTCWGLSFVVPGAIVAAMGIVCFLFLIEHPNDVRCSSTLVTHSKGYENGTNRLRLQKQILKSEKNKPLDPEMQCLLLSDGKGSIHPNHVVILPGDGGSGTAAISFTGALKIPGVIEFSLCLLFAKLVSYTFLFWLPLYITNVDHLDAKKAGELSTLFDVGGIFGGILAGVISDRLEKRASTCGLMLLLAAPTLYIFSTISKMGLEATIAMLLLSGALVSGPYTLITTAVSADLGTHKSLKGNAHALSTVTAIIDGTGSVGAALGPLLAGLLSPSGWSNVFYMLMFADACALLFLIRLIHKELSCPGSATGDQVPFKEQ

SEQ ID NO: 5762 - protein, 507 aa, Homo Sapiens [sequence omitted]

SEQ ID NO: 5763 - protein, 1692 aa, Homo Sapiens
IPEGRLSAEHTSSLVPSLHITTLGQEQAILSGAVPASPSTGTADFPSILTFLQPTENHASPSPVPEMPTLPAEGSDGSPPATRDLLLSSKVPNLLSTSWTFPRWKKDSVTAILGKNEEANVTIPLQGFPRKEVLSLHTVNGFVSDFSTGSVSSPIITAPRTNPLSSGPPLPSILSIQATQTVFPSLLAFSSTKPEVYAAAVDHSGLPASAPKQVRASPSSMDVYDSLTIGDMKKPATTDVFWSSLSAETGSLSTESIISGLQQQTNYDLNGHTISTTSWETHLAPTAPPNGLTSAADAIKSQDFKDTAGHSVTAEGFSIQDLVLGTSIEQPVQQSDMTMVGSHIDLWPTSNNNHSRDFQTAEVAYYSPTTRHSVSHPQLQLPNQPAHPLLLTSPGPTSTGSLQEMLSDGTDTGSEISSDINSSPERNASTPFQNILGYHSAAESSISTSVFPRTSSRVLRASQHPKKWTADTVSSKVQPTAAAAVTLFLRKSSPPALSAALVAKGTSSSPLAVASGPAKSSSMTTLAKNVTNKAASGPKRTPGAVHTAFPFTPTYMYARTGHTTSTHTAIARKHGHCLWPVVYNLPPPGKPQAMHTGLPNPTNLEMPRASTPRPLTVTAALTSITASVKATRLPPLRAENTDAVLPAASAAVVTTGKMASNLECQMSSKLLVKTVLFLTQRRVQISESLKFSIAKGLTQALRKAFHQNDVSAHVDILEYSHNVTVGYYATKGKLVYLPAVVIEMLGVYGVSNVTADLKQHTPHLQSVAVLASPWNPQPAGYFQLKTVLQFVSQADNIQSCKFAQTMEQRLQKAFQDAERKVLNTKSNLTIQIVSTSNASQAVTLVYVVGNQSTFLNGTVASSLLSQLSAELVGFYLTYPPLTIAEPLEYPNLDISETTRDYWVITVLQGVDNSLVGLHNQSFARVMEQRLAQLFMMSQQQGRRFKRATTLGSYTVQMVKMQRVPGPKDPAELTYYTLYNGKPLLGTVAAKILSTIDSQRMALTLHHVVLLQADPVVKNPPNNLWIIAAVLAPIAVVTVIIIIITAVLCRKNKNDFKPDTMINLPQRAKPVQGFDYAKQHLGQQGADEEVIPVTQETVVLPLPIRDAPQERDVAQDGSTIKTAKSTETRKSRSPSENGSVISNESGKPSSGRRSPQNVMAQQKVTKEEARKRNVPASDEEEGAVLFDNSSKVAAEPFDTSSGSVQLIAIKPTALPMVPPTSDRSQESSAVLNGEVNKALKQKSDIEHYRNKLRLKAKRKGYYDFPAVETSKGLTERKKMYEKAPKEMEHVLDPDSELCAPFTESKNRQQMKNSVYRSRQSLNSPSPGETEMDLLVTRERPRRGIRNSGYDTEPEIIEETNIDRVPEPRGYSRSRQVKGHSETSTLSSQPSIDEVRQQMHMLLEEAFSLASAGHAGQSRHQEAYGSAQHLPYSEVVTSAPGTMTRPRAGVQWVPTYRPEMYQYSLPRPAYRFSQLPEMVMGSPPPPVPPRTGPVAVASLRRSTSDIGSKTRMAESTGPEPAQLHDSASFTQMSRGPVSVTQLDQSALNYSGNTVPAVFAIPAANRPGFTGYFIPTPPSSYRNQAWMSYAGENELPSQWADSVPLPGYIEAYPRSRYPQSSPSRLPRQYSQPANLHPSLEQAPAPSTAASQQSLAENDPSDAPLTNISTAALVKAIREEVAKLAKKQTDMFEFQV

SEQ ID NO: 5764 - protein, 452 aa, Homo Sapiens
MTEVEYTQLQHILCSHMEAAADGELEMRLNSALLAAAGPGAGAGGFAAGGQGGAAPVYPVLCPSALAADAPCLGHIDFQELRMMLLSEAGAAEKTSGGGDGARARADGAAKEGAGAAAAAAGPDGAPEARAKPAVRVRLEDRFNSIPAEPPPAPRGPEPPEPGGALNNLVTLIRHPSELMNVPLQQQNKCTALVKNKTAATTTALQFTYPLFTTNACSTSGNSNLSQTQSSSNSCSVLEAAKHQDIGLPRAFSFCYQQEIESTKQTLGSRNKVLPEQVWIKVGEAALCKQALKRNRSRMRQLDTNVERRALGEIQNVGEGATATQGAWQSSESSQANLGEQAQSGPQGGRSQRRERHNRMERDRRRRIRICCDELNLLVPFCNAETDKATTLQWTTAFLKYIQERHGDSLKKEFESVFCGKTGRRLKLTRPDSLVTCPAQGSLQSSPSMEIK

SEQ ID NO: 5765 - protein, 509 aa, Homo Sapiens
MERRRLWGSIQSRYISMSVWTSPRRLVELAGQSLLKDEALAIAALELLPRELFPPLFMAAFDGRHSQTLKAMVQAWPFTCLPLGVLMKGQHLHLETFKAVLDGLDVLLAQEVRPRRWKLQVLDLRKNSHQDFWTVWSGNRASLYSFPEPEAAQPMTKKRKVDGLSTEAEQPFIPVEVLVDLFLKEGACDELFSYLIEKVKRKKNVLRLCCKKLKIFAMPMQDIKMILKMVQLDSIEDLEVTCTWKLPTLAKFSPYLGQMINLRRLLLSHIHASSYISPEKEEQYIAQFTSQFLSLQCLQALYVDSLFFLRGRLDQLLRHVMNPLETLSITNCRLSEGDVMHLSQSPSVSQLSVLSLSGVMLTDVSPEPLQALLERASATLQDLVFDECGITDDQLLALLPSLSHCSQLTTLSFYGNSISISALQSLLQHLIGLSNLTHVLYPVPLESYEDIHGTLHLERLAYLHARLRELLCELGRPSMVWLSANPCPHCGDRTFYDPEPILCPCFMPN

SEQ ID NO: 5766 - protein, 253 aa, Homo Sapiens
MMAQSKANGSHYALTAIGLGMLVLGVIMAMWNLVPGFSAAEKPTAQGSNKTEVGGGILKSKTFSVAYVLVGAGVMLLLLSICLSIRDKRKQRQGEDLAHVQHPTGAGPHAQEEDSQEEEEEDEEAASRYYVPSYEEVMNTNYSEARGEEQNPRLSISLPSYESLTGLDETTPTSTRADVEASPGNPPDRQNSKLAKRLKPLKVRRIKSEKLHLKDFRINLPDKNVPPPSIEPLTPPPQYDEVQEKAPDTRPPD

SEQ ID NO: 5767 - protein, 426 aa, Homo Sapiens
MAIAQLATEYVFSDFLLKEPTEPKFKGLRLELAVDKMVTCIAVGLPLLLISLAFAQEISIGTQISCFSPSSFSWRQAAFVDSYCWAAVQQKNSLQSESGNLPLWLHKFFPYILLLFAILLYLPPLFWRFAAAPHICSDLKFIMEELDKVYNRAIKAAKSARDLDMRDGACSVPGVTENLGQSLWEVSESHFKYPIVEQYLKTKKNSNNLIIKYISCRLLTLIIILLACIYLGYYFSLSSLSDEFVCSIKSGILRNDSTVPDQFQCKLIAVGIFQLLSVINLVVYVLLAPVVVYTLFVPFRQKTDVLKVYEILPTFDVLHFKSEGYNDLSLYNLFLEENISEVKSYKCLKVLENIKSSGQGIDPMLLLTNLGMIKMDVVDGKTPMSAEMREEQGNQTAELQGMNIDSETKANNGEKNARQRLLDSSC

SEQ ID NO: 5768 - protein, 1208 aa, Homo Sapiens
MERLRDVRERLQAWERAFRRQRGRRPSQDDVEAAPEETRALYREYRTLKRTTGQAGGGLRSSESLPAAAEEAPEPRCWGPHLNRAATKSPQPTPGRSRQGSVPDYGQRLKANLKGTLQAGPALGRRPWPLGRASSKASTPKPPGTGPVPSFAEKVSDEPPQLPEPQPRPGRLQHLQASLSQRLGSLDPGWLQRCHSEVPDFLGAPKACRPDLGSEESQLLIPGESAVLGPGAGSQGPEASAFQEVSIRVGSPQPSSSGGEKRRWNEEPWESPAQVQQESSQAGPPSEGAGAVAVEEDPPGEPVQAQPPQPCSSPSNPRYHGLSPSSQARAGKAEGTAPLHIFPRLARHDRGNYVRLNMKQKHYVRGRALRSRLLRKQAWKQKWRKKGECFGGGGATVTTKESCFLNEQFDHWAAQCPRPASEEDTDAVGPEPLVPSPQPVPEVPSLDPTVLPLYSLGPSGQLAETPAEVFQALEQLGHQAFRPGQERAVMRILSGISTLLVLPTGAGKSLCYQLPALLYSRRSPCLTLVVSPLLSLMDDQVSGLPPCLKAACIHSGMTRKQRESVLQKIRAAQVHVLMLTPEALVGAGGLPPAAQLPPVAFACIDEAHCLSQWSHNFRPCYLRVCKVLRERMGVHCFLGLTATATRRTASDVAQHLAVAEEPDLHGPAPVPTNLHLSVSMDRDTDQALLTLLQGKRFQNLDSIIIYCNRREDTERIAALLRTCLHAAWVPGSGGRAPKTTAEAYHAGMCSRERRRVQRAFMQGQLRVVVATVAFGMGLDRPDVRAVLHLGLPPSFESYVQAVGRAGRDGQPAHCHLFLQPQGEDLRELRRHVHADSTDFLAVKRLVQRVFPACTCTCTRPPSEQEGAVGGERPVPKYPPQEAEQLSHQAAPGPRRVCMGHERALPIQLTVQALDMPEEAIETLLCYLELHPHHWLELLATTYTHCRLNCPGGPAQLQALAHRCPPLAVCLAQQLPEDPGQGSSSVEFDMVKLVDSMGWELASVRRALCQLQWDHEPRTGVRRGTGVLVEFSELAFHLRSPGDLTAEEKDQICDFLYGRVQARERQALARLRRTFQAFHSVAFPSCGPCLEQQDEERSTRLKDLLGRYFEEEEGQEPGGMEDAQGPEPGQARLQDWEDQVRCDIRQFLSLRPEEKFSSRAVARIFHGIGSPCYPAQVYGQDRRFWRKYLHLSFHALVGLATEELLQVAR

SEQ ID NO: 5769 - protein, 263 aa, Homo Sapiens
MSLVAEAFVSQIAAAEPWPENATLYQQLKGEQILLSDNAASLAVQAFLQMCNLPIKVVCRANAEYMSPSGKVPFIHVGNQVVSELGPIVQFVKAKGHSLSDGLEEVQKAEMKAYMELVNNMLLTAELYLQWCDEATVGEITHARYGSPYPWPLNHILAYQKQWEVKRKMKAIGWGKKTLDQVLEDVDQCCQALSQRLGTQPYFFNKQPTELDALVFGHLYTILTTQLTNDELSEKVKNYSNLLAFCRRIEQHYFEDRGKGRLS

SEQ ID NO: 5770 - protein, 259 aa, Homo Sapiens
MATATGVAEERLLAALAYLQCAVGCAVFARNRQTNSVYGRHALPSHRLRVPARAAWVVQELPSLALPLYQYASESAPRLRSAPNCILLAMFLVHYGHRCLIYPFLMRGGKPMPLLACTMAIMFCTCNGYLQSRYLSHCAVYADDWVTDPRFLIGFGLWLTGMLINIHSDHILRNLRKPGDTGYKIPRGGLFEYVTAANYFGEIMEWCGYALASWSVQGAAFAFFTFCFLSGRAKEHHEWYLRKFEEYPKFRKIIIPFLF

SEQ ID NO: 5771 - protein, 1003 aa, Homo Sapiens
QAFAPNTSLSSPSPRDGVSPEHSPGWESGGLTPLGDLMCPLAHPAQDLPLLPSQLSLDPSGPEWDCPLGSKDLEEEGPWGGGSGLPPTGCFPGSWRQDVGLDCKGSPEGAEARAWTVYYYSLLQSCLQQAGLPETQDRGQVPRTGCPGAEVTLCVLGSPSTFLPVLLEGGVQSPGNMLLCLSPAWLMKVPAPGQPGEAALLVSKAVSFHPGGLTFLDDFVPPRRATYFLAGLGLGPGRGREAAELARDLTCPTGASAELARLLEDRLLTRQLLAQQGGVAVPATLAFTYKPPGLLRGGDASLGLRLVELSGKEGQETLVKEEVEAFLRSEALGDILQVAVKLSGWRWRGRQAWRLHPRAELGAVVDTVLALLEKLEEEESVLVEAVYPPAQLPCSDGPSPGPGLAVRICAVVCRTQGDRPLLSKVVCGVGRGDRPLRHHNSLPRTLEVALAQCGLGEEAQVAAVRQRVKAAAEAALAAVLALEAGLSAEQRGGRRAHTDFLGVDFALTAAGGVLTPVALELNGGLCLEACGALEGLWAAPRLGPAADEAVAAPLVETMLRRSARCLMEGKQLLVVGAGGVSKKFVWEAARDYGLQLHLVESDPNHFASQLVQTFIHFDMTEHRRDEENARLLAELVRARGLKLDGCFSYWDDCLVLTALLCQELGLPCSSPAAMRLAKQKSLTQLHLLHHHGPPWPAPSLHAVPCCPLESEADVERAVHQVPLPGVMKLEFGAGAVGVRLVEDAPQCHEHFSRITRDLQGEADHPGIGLGWGNAMLLMEFVEGTEHDVDLVLFGGRLLAAFVSDNGPTRLPGFTETAACMPTGLAPEQEAQMVQAAFRCCLGCGLLDGVFNVELKLTGAGPRLIEINPRMGGFYLRDWILELYGVDLLLAAVMVACGLRPALPTRPRARGHLVGVMCLVSQHLQALSSTASRETLQALHDRGLLRLNLLEEALVPGEYEEPYCSVACAGPSPTEARLRLLGLCQGLGIDGPSYPVAHFLSHFK

SEQ ID NO: 5772 - protein, 1287 aa, Homo Sapiens [sequence omitted]

SEQ ID NO: 5773 - protein, 527 aa, Homo Sapiens
MSDTLTADVIGRRVEVNGEHATVRFAGVVPPVAGPWLGVEWDNPERGKHDGSHEGTVYFKCRHPTGGSFIRPNKVNFGTDFLTAIKNRYVLEDGPEEDRKEQIVTIGNKPVETIGFDSIMKQQSQLSKLQEVSLRNCAVSCAGEKGGVAEACPNIRKVDLSKNLLSSWDEVIHIADQLRHLEVLNVSENKLKFPSGSVLTGTLSVLKVLVLNQTGITWAEVLRCVAGCPGLEELYLESNNIFISERPTDVLQTVKLLDLSSNQLIDENQLYLIAHLPRLEQLILSDTGISSLHFPDAGIGCKTSMFPSLKYLVVNDNQISQWSFFNELEKLPSLRALSCLRNPLTKEDKEAETARLLIIASIGQLKTLNKCEILPEERRRAELDYRKAFGNEWKQAGGHKDPEKNRLSEEFLTAHPRYQFLCLKYGAPEDWELKTQQPLMLKNQLLTLKIKYPHQLDQKVLEKQLPGSMTIQKVKGLLSRLLKVPVSDLLLSYESPKKPGREIELENDLKSLQFYSVENGDCLLVRW

SEQ ID NO: 5774 - protein, 630 aa, Homo Sapiens
METTPLNSQKQLSACEDGEDCQENGVLQKVVPTPGDKVESGQISNGYSAVPSPGAGDDTRHSIPATTTTLVAELHQGERETWGKKVDFLLSVIGYAVDLGNVWRFPYICYQNGGGAFLLPYTIMAIFGGIPLFYMELALGQYHRNGCISIWRKICPIFKGIGYAICIIAFYIASYYNTIMAWALYYLISSFTDQLPWTSCKNSWNTGNCTNYFSEDNITWTLHSTSPAEEFYTRHVLQIHRSKGLQDLGGISWQLALCIMLIFTVIYFSIWKGVKTSGKVVWVTATFPYIILSVLLVRGATLPGAWRGVLFYLKPNWQKLLETGVWIDAAAQIFFSLGPGFGVLLAFASYNKFNNNCYQDALVTSVVNCMTSFVSGFVIFTVLGYMAEMRNEDVSEVAKDAGPSLLFITYAEAIANMPASTFFAIIFFLMLITLGLDSTFAGLEGVITAVLDEFPHVWAKRRERFVLAVVITCFFGSLVTLTFGGAYVVKLLEEYATGPAVLTVALIEAVAVSWFYGITQFCRDVKEMLGFSPGWFWRICWVAISPLFLLFIICSFLMSPPQLRLFQYNYPYWSIILGYCIGTSSFICIPTYIAYRLIITPGTFKERIIKSITPETPTEIPCGDIRLNAV

SEQ ID NO: 5775 - protein, 456 aa, Homo Sapiens
MARGDAPRDSYHLVGISFFILGLGTLLPWNFFITAIPYFQARLAGAGNSTARILSTNHTGPEDAFNFNNWVTLLSQLPLLLFTLLNSFLYQCVPETVRILGSLLAILLLFALTAALVKVDMSPGPFFSITMASVCFINSFSAVLQGSLFGQLGTMPSTYSTLFLSGQGLAGIFAALAMLLSMASGVDAETSALGYFITPCVGILMSIVCYLSLPHLKFARYYLANKSSQAQAQELETKAELLQSDENGIPSSPQKVALTLDLDLEKEPESEPDEPQKPGKPSVFTVFQKIWLTALCLVLVFTVTLSVFPAITAMVTSSTSPGKWSQFFNPICCFLLFNIMDWLGRSLTSYFLWPDEDSRLLPLLVCLRFLFVPLFMLCHVPQRSRLPILFPQDAYFITFMLLFAVSNGYLVSLTMCLAPRQVLPHEREVAGALMTFFLALGLSCGASLSFLFKALL

SEQ ID NO: 5776 - protein, 441 aa, Homo Sapiens
MVQQAESLEAESNLPREALDTEEGEFMACSPVALDESDPDWCKTASGHIKRPMNAFMVWSKIERRKIMEQSPDMHNAEISKRLGKRWKMLKDSEKIPFIREAERLRLKHMADYPDYKYRPRKKPKMDPSAKPSASQSPEKSAAGGGGGSAGGGAGGAKTSKGSSKKCGKLKAPAAAGAKAGAGKAAQSGDYGGAGDDYVLGSLRVSGSGGGGAGKTVKCVFLDEDDDDDDDDDELQLQIKQEPDEEDEEPPHQQLLQPPGQQPSQLLRRYNVAKVPASPTLSSSAESPEGASLYDEVRAGATSGAGGGSRLYYSFKNITKQHPPPLAQPALSPASSRSVSTSSSSSSGSSSGSSGEDADDLMFDLSLNFSQSAHSASEQQLGGGAAAGNLSLSLVDKDLDSFSEGSLGSHFEFPDYCTPELSEMIAGDWLEANFSDLVFTY

SEQ ID NO: 5777 - protein, 1316 aa, Homo Sapiens
QPLPSAALRRCPPPARVGGRWVSAEKVNEGGSGGGGSQRLTRRARSTARVPAPGTMDAPRASAAKPPTGRKMKARAPPPPGKAATLHVHSDQKPPHDGALGSQQNLVRMKEALRASTMDVTVVLPSGLEKRSVLNGSHAMMDLLVELCLQNHLNPSHHALEIRSSETQQPLSFKPNTLIGTLNVHTVFLKEKVPEEKVKPGPPKVPEKSVRLVVNYLRTQKAVVRVSPEVPLQNILPVICAKCEVSPEHVVLLRDNIAGEELELSKSLNELGIKELYAWDNRRETFRKSSLGNDETDKEKKKFLGFFKVNKRSNSKGCLTTPNSPSMHSRSLTLGPSLSLGSISGVSVKSEMKKRRAPPPPGSGPPVQDKASEKVSLGSQIDLQKKKRRAPAPPPPQPPPPSPLIPNRTEDKEENRKSTMVSLPLGSGSHCSPDGAPQVLSEAEETVSVGSCFASEDTTEDSGVMSSPSDIVSLDSQQDSMKYKDKWATDQEDCSDQDLAGTPDLGPQKSPLWEKNGSENSHLRTEKAVTASNDEEDLLIAGEFRKTLAELDEDLEEMEDSYETDTSSLTSSIHGASNHCPQDAMIPHGDTDAIPVTFIGEVSDDPVDSGLFSNRNNNAGSFDSEGVASRRDSLAPLQAEHSQPHEKAREEVPALHPASHDVGKGIRVALSNISKDGNLMETAPRVTSFASNLHTDNLNAKVKDKVYGCADGERTQATERVNSQPVNEKDSNDKNAALAPTSWHQRGQNPGKSYRLKHGLTTYKIIPPKSEMRCYDRDVSLSTGAIKIDELGNLVSPHATGIRIISLSSSVPEAESQPIGKVREFWRCNSVEKHLGRPSESSARGPPSTPVPTQTQNPESRLQADPKPISPQQKSAHHEGRNPLGEGRNQPPTMGMGHVRVPAAHTTEVTFLKPQRRTSSQYVASAIAKRIGAPKVHADVVRPHGYAEKGYAGKAPVLAAPPVTVKDDRTSSPHSETQGWKDGAQWPCVTPPNNHGEDLAVGAPPRGEVIGPHRKLSTQDRPAAIHRSSCFSLVQSSQRDRVSVGQSCGFSGKQSTSSQEASSASEPRRAPDGTDPPPPHTSDTQACSRELVNGSVRAPGHGEPSHPPGGSGTESHILLEREEKPSVFSTDGNETDSIWPPSIFGPKKKFKPVVQRPVPKDTSLHSALMEAIHSAGGKDRLRKTAEHTGEGRPAKLSYTEAEGERSALLAAIRGHSGTCSLRKVASSASEELQSFRDAALSAQGSESPLLEDLGLLSPPAIPPPPPPPSQALSAPRTASRFSTGTLSNTADARQALMDAIRSGTGAARLRKVPLLV

SEQ ID NO: 5778 - protein, 943 aa, Homo Sapiens
MGLTKQYLRYVASAVFGVIGSQKGNIVFVTLRGEKGRYVAVPACEHVFIWDLRKGEKILILQGLKQEVTCLCPSPDGLHLAVGYEDGSIRIFSLLSGEGNVTFNGHKAAITTLKYDQLGGRLASGSKDTDIIVWDVINESGLYRLKGHKDAITQALFLREKNLLVTSGKDTMVKWWDLDTQHCFKTMVGHRTEVWGLVLLSEEKRLITGASDSELRVWDIAYLQEIEDPEEPDPKKIKGSSPGIQDTLEAEDGAFETDEAPEDRILSCRKAGSIMREGRDRVVNLAVDKTGRILACHGTDSVLELFCILSKKEIQKKMDKKMKKARKKAKLHSSKGEEEDPEVNVEMSLQDEIQRVTNIKTSAKIKSFDLIHSPHGELKAVFLLQNNLVELYSLNPSLPTPQPVRTSRITIGGHRSDVRTLSFSSDNIAVLSAAADSIKIWNRSTLQCIRTMTCEYALCSFFVPGDRQVVIGTKTGKLQLYDLASGNLLETIDAHDGALWSMSLSPDQRGFVTGGADKSVKFWDFELVKDENSTQKRLSVKQTRTLQLDEDVLCVSYSPNQKLLAVSLLDCTVKIFYVDTLKFFLSLYGHKLPVICMDISHDGALIATGSADRNVKIWGLDFGDCHKSLFAHDDSVMYLQFVPKSHLFFTAGKDHKIKQWDADKFEHIQTLEGHHQEIWCLAVSPSGDYVVSSSHDKSLRLWERTREPLILEEEREMEREAEYEESVAKEDQPAVPGETQGDSYFTGKKTIETVKAAERIMEAIELYREETAKMKEHKAICKAAGKEVPLPSNPILMAYGSISPSAYVLEIFKGIKSSELEESLLVLPFSYVPDILKLFNEFIQLGSDVELICRCLFFLLRIHFGQITSNQMLVPVIEKLRETTISKVSQVRDVIGFNMAGLDYLKRECEAKSEVMFFADATSHLEEKKRKRKKREKLILTLT

SEQ ID NO: 5779 - protein, 189 aa, Homo Sapiens
MLWKLVENVKYEDIYEDRHDGVPSHSSRLSQLGSVSQGPYSSAPPLSHTPSSDFQPPYFPPPYQPLPYHQSQDPYSHVNDPYSLNPLHQPQQHPWGQRQRQEVGSEAGSLLPQPRAALPQLSGLDPRRDYHSVRRPDVLLHSAHHGLDAGMGDSLSLHGLGHPGMEDVQSVEDANNSGMNLLDQSVIKK

SEQ ID NO: 5780 - protein, 686 aa, Homo Sapiens
APAAGAPGRPGPASAGTAAGRMLRERTVRLQYGSRVEAVYVLGTYLWTDVYSAAPAGAQTFSLKHSEHVWVEVVRDGEAEEVATNGKQRWLLSPSTTLRVTMSQASTEASSDKVTVNYYDEEGSIPIDQAGLFLTAIEISLDVDADRDGVVEKNNPKKASWTWGPEGQGAILLVNCDRETPWLPKEDCRDEKVYSKEDLKDMSQMILRTKGPDRLPAGYEIVLYISMSDSDKVGVFYVENPFFGQRYIHILGRRKLYHVVKYTGGSAELLFFVEGLCFPDEGFSGLVSIHVSLLEYMAQDIPLTPIFTDTVIFRIAPWIMTPNILPPVSVFVCCMKDNYLFLKEVKNLVEKTNCELKVCFQYLNRGDRWIQDEIEFGYIEAPHKGFPVVLDSPRDGNLKDFPVKELLGPDFGYVTREPLFESVTSLDSFGNLEVSPPVTVNGKTYPLGRILIGSSFPLSGGRRMTKVVRDFLKAQQVQAPVELYSDWLTVGHVDEFMSFVPIPGTKKFLLLMASTSACYKLFREKQKDGHGEAIMFKGLGGMSSKRITINKILSNESLVQENLYFQRCLDWNRDILKKELGLTEQDIIDLPALFKMDEDHRARAFFPNMVNMIVLDKDLGIPKPFGPQVEEECCLEMHVRGLLEPLGLECTFIDDISAYHKFLGEVHCGTNVRRKPFTFKWWHMVP

SEQ ID NO: 5781 - protein, 396 aa, Homo Sapiens
AMRVLLSKLPRPWIVDEKKDDGYTALHLAALNNHVEVAELLVHQGNANLDIQNVNQQTALHLAVERQHTQIVRLLVRAGAKLDIQDKDGDTPLHEALRHHTLSQLRQLQDMQDVGKVDAAWEPSKNTLIMGLGTQGAEKKSAASIACFLAANGADLSIRNKKGQSPLDLCPDPNLCKALAKCHKEKVSGQVGSRSPSMISNDSETLEECMVCSDMKRDTLFGPCGHIATCSLCSPRVKKCLICKEQVQSRTKIEECVVCSDKKAAVLFQPCGHMCACENCANLMKKCVQCRAVVERRVPFIMCCGGKSSEDATDDISSGNIPVLQKDKDNTNVNADVQKLQQQLQDIKEQTMCPVCLDRLKNMIFLCGHGTCQLCGDRMSECPICRKAIERRILLY

SEQ ID NO: 5782 - protein, 699 aa, Homo Sapiens
MKIAVLFCFFLLIIFQTDFGKNEEIPRKQRRKIYHRRLRKSSTSHKHRSNRQLGIQQTTVFTPVARLPIVNFDYSMEEKFESFSSFPGVESSYNVLPGKKGHCLVKGITMYNKAVWSPEPCTTCLCSDGRVLCDETMCHPQRCPQTVIPEGECCPVCSATVSYSLLSGIALNDRNEFSGDSSEQREPTNLLHKQLPPPQVGMDRIVRKEALQSEEDEEVKEEDTEQKRETPESRNQGQLYSEGDSRGGDRKQRPGEERRLAHQQQRQGREEEEDEEEEGEEGEEDEEDEEDPVRGDMFRMPSRSPLPAPPRGTLRLPSGCSLSYRTISCINAMLTQIPPLTAPQITSLELTGNSIASIPDEAFNGLPNLERLDLSKNNITSSGIGPKAFKLLKKLMRLNMDGNNLIQIPSQLPSTLEELKVNENNLQAIDEESLSDLNQLVTLELEGNNLSEANVNPLAFKPLKSLAYLRLGKNKFRIIPQGLPGSIEELYLENNQIEEITEICFNHTRKINVIVLRYNKIEENRIAPLAWINQENLESIDLSYNKLYHVPSYLPKSLLHLVLLGNQIERIPGYVFGHMEPGLEYLYLSFNKLADDGMDRVSFYGAYHSLRELFLDHNDLKSIPPGIQEMKALHFLRLNNNKIRNILPEEICNAEEDDDSNLEHLHLENNYIKIREIPSYTFSCIRSYSSIVLKPQNIK

SEQ ID NO: 5783 - protein, 363 aa, Homo Sapiens
MQAFLKGTSISTKPPLTKDRGVAASAGSSGENKKAKPVPWVEKYRPKCVDEVAFQEEVVAVLKKSLEGADLPNLLFYGPPGTGKTSTILAAARELFGPELFRLRVLELNASDERGIQVVREKVKNFAQLTVSGSRSDGKPCPPFKIVILDEADSMTSAAQAALRRTMEKESKTTRFCLICNYVSRIIEPLTSRCSKFRFKPLSDKIQQQRLLDIAKKENVKISDEGIAYLVKVSEGDLRKAITFLQSATRLTGGKEITEKVITDIAGVIPAEKIDGVFAACQSGSFDKLEAVVKDLIDEGHAATQLVNQLHDVVVENNLSDKQKSIITEKLAEVDKCLADGADEHLQLISLCATVMQQLSQNC

SEQ ID NO: 5784 - protein, 501 aa, Homo Sapiens
MVLWGPVLGALLVVIAGYLCLPGMLRQRRPWEPPLDKGTVPWLGHAMAFRKNMFEFLKRMRTKHGDVFTVQLGGQYFTFVMDPLSFGPILKDTQRKLDFGQYAKKLVLKVFGYRSVQGDHEMIHSASTKHLRGDGLKDLNETMLDSLSFVMLTSKGWSLDASCWHEDSLFRFCYYILFTAGYLSLFGYTKDKEQDLLQAGELFMEFRKFDLLFPRFVYSLLWPREWLEVGRLQRLFHKMLSVSHSQEKEGISNWLGNMLQFLREQGVPSAMQDKFNFMMLWASQGNTGPTSFWALLYLLKHPEAIRAVREEATQVLGEARLETKQSFAFKLGALQHTPVLDSVVEETLRLRAAPTLLRLVHEDYTLKMSSGQEYLFRHGDILALFPYLSVHMDPDIHPEPTVFKYDRFLNPNGSRKVDFFKTGKKIHHYTMPWGSGVSICPGRFFALSEVKLFILLMVTHFDLELVDPDTPLPHVDPQRWGFGTMQPSHDVRFRYRLHPTE

SEQ ID NO: 5785 - protein, 150 aa, Homo Sapiens
GRRTGRLRPAAAPSAAAATAGAPTALPAYPAAEPPGPLWLQGEPLHFCCLDFSLEELQGEPGWRLNRKPIESTLVACFMTLVIVVWSVAALIWPVPIIAGFLPNGMEQRRTTASTTAATPAAVPAGTTAAAAAAAAAAAAAAVTSGVATK

SEQ ID NO: 5786 - protein, 201 aa, Homo Sapiens
MALSWVLTVLSLLPLLEAQIPLCANLVPVPITNATLDQITGKWFYIASAFRNEEYNKSVQEIQATFFYFTPNKTEDTIFLREYQTRQDQCIYNTTYLNVQRENGTISRYVGGQEHFAHLLILRDTKTYMLAFDVNDEKNWGLSVYADKPETTKEQLGEFYEALDCLRIPKSDVVYTDWKKDKCEPLEKQHEKERKQEEGES

SEQ ID NO: 5787 - protein, 945 aa, Homo Sapiens
EGSCFPKKPGCLPRSEEAVVTASRNHEQTVLGPLSGNLMLPAQPPHEGSVEQVGGERCRGPQSSGPVEAKQEDSPFQCPKEERPGGVPCMDQGGCPLAGLSQEVPTMPSLPGTGLTASPKAGPCSTPTSQHGSTATFLPSEDQVLMSSAPTLHLGLGTPTQSHPPETMATSSEGACAQVPDVEGRTPGPRSCDPGLIDSLKNYLLLLLKLSSTETSGAGGESQVGAATGGLVPSATLTPTVEVAGLSPRTSRRILERVENNHLVQSAQTLLLSPCTSRRLTGLLDREVQAGRQALAAARGSWGPGPSSLTVPAIVVDEEDPGLASEGASEGEGEVSLEGPGLLGASQESSMAGRLGEAGGQAAPGQGPSAESIAQEPSQEEKFPGEALTGLPAATPEELALGARRKRFLPKVRAAGDGEATTPEERESPTVSPRGPRKSLVPGSPGTPGRERRSPTQGRKASMLEVPRAEEELAAGDLGPSPKAGGLDTEVALDEGKQETLAKPRKAKDLLKAPQVIRKIRVEQFPDASGSLKLWCQFFNILSDSVLTWAKDQRPVGEVGRSAGDEGPAALAIVQASPVDCGVYRCTIHNEHGSASTDFCLSPEVLSGFISREEGEVGEEIEMTPMVFAKGLADSGCWGDKLFGRLVSEELRGGGYGCGLRKASQAKVIYGLEPIFESGRTCIIKVSSLLVFGPSSETSLVGRNYDVTIQGCKIQNMSREYCKIFAAEARAAPGFGEVPEIIPLYLIYRPANNIPYATLEEDLGKPLESYCSREWGCAEAPTASGSSEAMQKCQTFQHWLYQWTNGSFLVTDLAGVDWKMTDVQIATKLRGYQGLKESCFPALLDRFASSHQCNAYCELLGLTPLKGPEAAHPQAKAKGSKSPSAGRKGSQLSPQPQKKGLPSPQGTRKSAPSSKATPQASEPVTTQLLGQPPTQEEGSKAQGMR

SEQ ID NO: 5788 - protein, 647 aa, Homo Sapiens
MRLTLLCCTWREERMGEEGSELPVCASCGQRIYDGQYLQALNADWHADCFRCCDCSASLSHQYYEKDGQLFCKKDYWARYGESCHGCSEQITKGLVMVAGELKYHPECFICLTCGTFIGDGDTYTLVEHSKLYCGHCYYQTVVTPVIEQILPDSPGSHLPHTVTLVSIPASSHGKRGLSVSIDPPHGPPGCGTEHSHTVRVQGVDPGCMSPDVKNSIHVGDRILEINGTPIRNVPLDEIDLLIQETSRLLQLTLEHDPHDTLGHGLGPETSPLSSPAYTPSGEAGSSARQKPVLRSCSIDRSPGAGSLGSPASQRKDLGRSESLRVVCRPHRIFRPSDLIHGEVLGKGCFGQAIKVTHRETGEVMVMKELIRFDEETQRTFLKEVKVMRCLEHPNVLKFIGVLYKDKRLNFITEYIKGGTLRGIIKSMDSQYPWSQRVSFAKDIASGMAYLHSMNIIHRDLNSHNCLVRENKNVVVADFGLARLMVDEKTQPEGLRSLKKPDRKKRYTVVGNPYWMAPEMINGRSYDEKVDVFSFGIVLCEIIGRVNADPDYLPRTMDFGLNVRGFLDRYCPPNCPPSFFPITVRCCDLDPEKRPSFVKLEHWLETLRMHLAGHLPLGPQLEQLDRGFWETYRRGESGLPAHPEVPD

SEQ ID NO: 5789 - protein, 1050 aa, Homo Sapiens [sequence omitted]

SEQ ID NO: 5790 - protein, 1417 aa, Homo Sapiens
MAAVPQNNLQEQLERHSARTLNNKLSLSKPKFSGFTFKKKTSSDNNVSVTNVSVAKTPVLRNKDVNVTEDFSFSEPLPNTTNQQRVKDFFKNAPAGQETQRGGSKSLLPDFLQTPKEVVCTTQNTPTVKKSRDTALKKLEFSSSPDSLSTINDWDDMDDFDTSETSKSFVTPPQSHFVRVSTAQKSKKGKRNFFKAQLYTTNTVKTDLPPPSSESEQIDLTEEQKDDSEWLSSDVICIDDGPIAEVHINEDAQESDSLKTHLEDERDNSEKKKNLEEAELHSTEKVPCIEFDDDDYDTDFVPPSPEEIISASSSSSKCLSTLKDLDTSDRKEDVLSTSKDLLSKPEKMSMQELNPETSTDCDARQISLQQQLIHVMEHICKLIDTIPDDKLKLLDCGNELLQQRNIRRKLLTEVDFNKSDASLLGSLWRYRPDSLDGPMEGDSCPTGNSMKELNFSHLPSNSVSPGDCLLTTTLGKTGFSATRKNLFERPLFNTHLQKSFVSSNWAETPRLGKKNESSYFPGNVLTSTAVKDQNKHTASINDLERETQPSYDIDNFDIDDFDDDDDWEDIMHNLAASKSSTAAYQPIKEGRPIKSVSERLSSAKTDCLPVSSTAQNINFSESIQNYTDKSAQNLASRNLKHERFQSLSFPHTKEMMKIFHKKFGLHNFRTNQLEAINAALLGEDCFILMPTGGGKSLCYQLPACVSPGVTVVISPLRSLIVDQVQKLTSLDIPATYLTGDKTDSEATNIYLQLSKKDPIIKLLYVTPEKICASNRLISTLENLYERKLLARFVIDEAHCVSQWGHDFRQDYKRMNMLRQKFPSVPVMALTATANPRVQKDILTQLKILRPQVFSMSFNRHNLKYYVLPKKPKKVAFDCLEWIRKHHPYDSGIIYCLSRRECDTMADTLQRDGLAALAYHAGLSDSARDEVQQKWINQDGCQVICATIAFGMGIDKPDVRFVIHASLPKSVEGYYQESGRAGRDGEISHCLLFYTYHDVTRLKRLIMMEKDGNHHTRETHFNNLYSMVHYCENITECRRIQLLAYFGENGFNPDFCKKHPDVSCDNCCKTKDYKTRDVTDDVKSIVRFVQEHSSSQGMRNIKHVGPSGRFTMNMLVDIFLGSKSAKIQSGIFGKGSAYSRHNAERLFKKLILDKILDEDLYINANDQAIAYVMLGNKAQTVLNGNLKVDFMETENSSSVKKQKALVAKVSQREEMVKKCLGELTEVCKSLGKVFGVHYFNIFNTVTLKKLAESLSSDPEVLLQIDGVTEDKLEKYGAEVISVLQKYSEWTSPAEDSSPGISLSSSRGPGRSAAEELDEEIPVSSHYFASKTRNERKRKKMPASQRSKRRKTASSGSKAKGGSATCRKISSKTKSSSIIGSSSASHTSQATSGANSKLGIMAPPKPINRPFLKPSYAFS

SEQ ID NO: 5791 - protein, 1035 aa, Homo Sapiens
MGKAENYELYSVELGPGPGGDMAAKMSKKKKAGGGGGKRKEKLENMKKEMEINDHQLSVAELEQKYQTSATKGLSASLAAELLLRDGPNALRPPRGTPEYVKFARQLAGGLQCLMWVAAAICLIAFAIQASEGDLTTDDNLYLAIALIAVVVVTGCFGYYQEFKSTNIIASFKNLVPQQATVIRDGDKFQINADQLVVGDLVEMKGGDRVPADIRILAAQGCKVDNSSLTGESEPQTRSPECTHESPLETRNIAFFSTMCLEGTAQGLVVNTGDRTIIGRIASLASGVENEKTPIAIEIEHFVDIIAGLAILFGATFFIVAMCIGYTFLRAMVFFMAIVVAYVPEGLLATVTVCLSLTAKRLASKNCVVKNLEAVETLGSTSVICSDKTGTLTQNRMTVSHLWFDNHIHTADTTEDQSGQTFDQSSETWRALCRVLTLCNRAAFKSGQDAVPVPKRIVIGDASETALLKFSELTLGNAMGYRDRFPKVCEIPFNSTNKFQLSIHTLEDPRDPRHLLVMKGAPERVLERCSSILIKGQELPLDEQWREAFQTAYLSLGGLGERVLGFCQLYLNEKDYPPGYAFDVEAMNFPSSGLCFAGLVSMIDPPRATVPDAVLKCRTAGIRVIMVTGDHPITAKAIAASVGIISEGSETVEDIAARLRVPVDQVNRKDARACVINGMQLKDMDPSELVEALRTHPEMVFARTSPQQKLVIVESCQRLGAIVAVTGDGVNDSPALKKADIGVAMGIAGSDAAKNAADMILLDDNFASIVTGVEQGRLIFDNLKKSIAYTLTKNIPELTPYLIYITVSVPLPLGCITILFIELCTDIFPSVSLAYEKAESDIMHLRPRNPKRDRLVNEPLAAYSYFQIGAIQSFAGFTDYFTAMAQEGWFPLLCVGLRAQWEDHHLQDLQDSYGQEWTFGQRLYQQYTCYTVFFISIEVCQIADVLIRKTRRLSAFQQGFFRNKILVIAIVFQVCIGCFLCYCPGMPNIFNFMPIRFQWWLVPLPYGILIFVYDEIRKLGVRCCPGSWWDQELYY

SEQ ID NO: 5792 - protein, 453 aa, Homo Sapiens
MSKISEAVKRARAAFSSGRTRPLQFRIQQLEALQRLIQEQEQELVGALAADLHKNEWNAYYEEVVYVLEEIEYMIQKLPEWAADEPVEKTPQTQQDELYIHSEPLGVVLVIGTWNYPFNLTIQPMVGAIAAGNSVVLKPSELSENMASLLATIIPQYLDKDLYPVINGGVPETTELLKERFDHILYTGSTGVGKIIMTAAAKHLTPVTLELGGKSPCYVDKNCDLDVACRRIAWGKFMNSGQTCVAPDYILCDPSIQNQIVEKLKKSLKEFYGEDAKKSRDYGRIISARHFQRVMGLIEGQKVAYGGTGDAATRYIAPTILTDVDPQSPVMQEEIFGPVLPIVCVRSLEEAIQFINQREKPLALYMFSSNDKVIKKMIAETSSGGVAANDVIVHITLHSLPFGGVGNSGMGSYHGKKSFETFSHRRSCLVRPLMNDEGLKVRYPPSPAKMTQH

SEQ ID NO: 5793 - protein, 62 aa, Homo Sapiens
MKFLVFAFILALMVSMIGADSSEEKFLRRIGRFGYGYGPYQPVPEQPLYPQPYQPQYQQYTF

SEQ ID NO: 5794 - protein, 141 aa, Homo Sapiens
MGFQKFSPFLALSILVLLQAGSLHAAPFRSALESSPADPATLSEDEARLLLAALVQDYVQMKASELEQEQEREGSSLDSPRSKRCGNLSTCMLGTYTQDFNKFHTFPQTAIGVGAPGKKRDMSSDLERDHRPHVSMPQNAN

SEQ ID NO: 5795 - protein, 211 aa, Homo Sapiens
MVAHNQVAADNAVSTAAEPRRRPEPSSSSSSSPAAPARPRPCPAVPAPAPGDTHFRTFRSHADYRRITRASALLDACGFYWGPLSVHGAHERLRAEPVGTFLVRDSRQRNCFFALSVKMASGPTSIRVHFQAGRFHLDGSRESFDCLFELLEHYVAAPRRMLGAPLRQRRVRPLQELCRQRIVATVGRENLARIPLNPVLRDYLSSFPFQI

SEQ ID NO: 5796 - protein, 1581 aa, Homo Sapiens [sequence omitted]

SEQ ID NO: 5797 - protein, 199 aa, Homo Sapiens
MKWVWALLLLAAWAAAERDCRVSSFRVKENFDKARFSGTWYAMAKKDPEGLFLQDNIVAEFSVDETGQMSATAKGRVRLLNNWDVCADMVGTFTDTEDPAKFKMKYWGVASFLQKGNDDHWIVDTDYDTYAVQYSCRLLNLDGTCADSYSFVFSRDPNGLPPEAQKIVRQRQEELCLARQYRLIVHNGYCDGRSERNLL

SEQ ID NO: 5798 - protein, 396 aa, Homo Sapiens
KLPWRHLQKRAQDAVIILGGGGLLFASYLMATGDERFYAEHLMPTLQGLLDPESAHRLAVRFTSLGLLPRARFQDSDMLEVRVLGHKFRNPVGIAAGFDKHGEAVDGLYKMGFGFVEIGSVTPKPQEGNPRPRVFRLPEDQAVINRYGFNSHGLSVVEHRLRARQQKQAKLTEDGLPLGVNLGKNKTSVDAAEDYAEGVRVLGPLADYLVVNVSSPNTAGLRSLQGKAELRRLLTKVLQERDGLRRVHRPAVLVKIAPDLTSQDKEDIASVVKELGIDGLIVTNTTVSRPAGLQGALRSETGGLSGKPLRDLSTQTIREMYALTQGRVPIIGVGGVSSGQDALEKIRAGASLVQLYTALTFWGPPVVGKVKRELEALLKEQGFGGVTDAIGADHRR

SEQ ID NO: 5799 - protein, 399 aa, Homo Sapiens [sequence omitted]

SEQ ID NO: 5800 - protein, 477 aa, Homo Sapiens
MAQRYDELPHYGGMDGVGVPASMYGDPHAPRPIPPVHHLNHGPPLHATQHYGAHAPHPNVMPASMGSAVNDALKRDKDAIYGHPLFPLLALVFEKCELATCTPREPGVAGGDVCSSDSFNEDIAVFAKQVRAEKPLFSSNPELDNLMIQAIQVLRFHLLELEKVHELCDNFCHRYISCLKGKMPIDLVIDERDGSSKSDHEELSGSSTNLADHNPSSWRDHDDATSTHSAGTPGPSSGGHASQSGDNSSEQGDGLDNSVASPGTGDDDDPDKDKKRQKKRGIFPKVATNIMRAWLFQHLTHPYPSEEQKKQLAQDTGLTILQVNNWFINARRRIVQPMIDQSNRAGFLLDPSVSQGAAYSPEGQPMGSFVLDGQQHMGIRPAGLQSMPGDYVSQGGPMGMSMAQPSYTPPQMTPHPTQLRHGPPMHSYLPSHPHHPAMMMHGGPPTHPGMTMSAQSPTMLNSVDPNVGGQVMDIHAQ

SEQ ID NO: 5801 - protein, 401 aa, Homo Sapiens
MQVDETLIPRKGPSLCSARYGIALVLHFCNFTTIAQNVIMNITMVAMVNSTSPQSQLNDSSEVLPVDSFGGLSKAPKSLPAKSSILGGQFAIWEKWGPPQERSRLCSIALSGMLLGCFTAILIGGFISETLGWPFVFYIFGGVGCVCCLLWFVVIYDDPFSYPWISTSEKEYIISSLKQQVGSSKQPLPIKAMLRSLPIWSICLGCFSHQWLVSTMVVYIPTYISSVYHVNIRDNGLLSALPFIVAWVIGMVGGYLADFLLTKKFRLITVRKIATILGSLPSSALIVSLPYLNSGYITATALLTLSCGLSTLCQSGIYINVLDIAPRYSSFLMGASRGFSSIAPVIVPTVSGFLLSQDPEFGWRNVFFLLFAVNLLGLLFYLIFGEADVQEWAKERKLTRL

SEQ ID NO: 5802 - protein, 496 aa, Homo Sapiens
MFRSKRSGLVRRLWRSRVVPNREEGGSGGGGGGDEDGSLGSRAEPAPRAREGGGCGRSEVRPVAPRRPRDAVGQRGAQGAGRRRRAGGPPRPMSEPGAGAGSSLLDVAEPGGPGWLPESDCETVTCCLFSERDAAGAPRDASDPLAGAALEPAGGGRSREARSRLLLLEQELKTVTYSLLKRLKERSLDTLLEAVESRGGVPGGCVLVPRADLRLGGQPAPPQLLLGRLFRWPDLQHAVELKPLCGCHSFAAAADGPTVCCNPYHFSRLCGPESPPPPYSRLSPRDEYKPLDLSDSTLSYTETEATNSLITAPGEFSDASMSPDATKPSHWCSVAYWEHRTRVGRLYAVYDQAVSIFYDLPQGSGFCLGQLNLEQRSESVRRTRSKIGFGILLSKEPDGVWAYNRGEHPIFVNSPTLDAPGGRALVVRKVPPGYSIKVFDFERSGLQHAPEPDAADGPYDPNSVRISFAKGWGPCYSRQFITSCPCWLEILLNNPR

SEQ ID NO: 5803 - protein, 228 aa, Homo Sapiens
MLGGREAEAHARPYMASVQLNGAHLCAGVLVAERWVLSAAHCLEDAADGKVQVLLGAHSLSQPEPSKRLYDVLRAVPHPDSQPDTIDHDLLLLQLSEKATLGPAVRPLPWQRVDRDVAPGTLCDVAGWGIVNHAGRRPDSLQHVLLPVLDRATCNRRTHHDGAITERLMCAESNRRDSCKGDSGGPLVCGGVLEGVVTSGSRVCGNRKKPGIYTRVASYAAWIDSVLA

SEQ ID NO: 5804 - protein, 474 aa, Homo Sapiens [sequence omitted]

SEQ ID NO: 5805 - protein, 454 aa, Homo Sapiens [sequence omitted]

SEQ ID NO: 5806 - protein, 290 aa, Homo Sapiens
MGLLLPLPVPGLLLLEAETHPHFPCNHGQEGACTRHARVRAYPGPLVHRRKRPAWLWELAAPACPGAAMERIEGASVGRCAASPYLRPLTLHYRQNGAQKSWDFMKTHDSVTVLLFNSSRRSLVLVKQFRPAVYAGEVERRFPGSLAAVDQDGPRELQPALPGSAGVTVELCAGLVDQPGLSLEEVACKEAWEECGYHLAPSDLRRVATYWSGVGLTGSRQTMFYTEVTDAQRSGPGGGLVEEGELIEVVHLPLEGAQAFADDPDIPKTLGVIFGVSWFLSQVAPNLDLQ

SEQ ID NO: 5807 - protein, 423 aa, Homo Sapiens
MDRGQPSLEPAAAAPRASGRCVIAPVRAVLRLRRRVCVLRKRRLLQPGGGPDVGTGAPRPGCSPRAPRADLDQPKFFTFDSPAELPSRTPRKKRRRSRLVLYPETSRKYRPRVEHRSRAQRCLLLLVAIVGFQVLNAIENLDDNAQRYDLDGLEKALQRAVFGQPAAVSRIVALMRDYLATHVHSRPLLLALHGPSGVGKSHVGRLLARHFRSVLEDSALVLQYHARHHCPEARAAQDCREELARRVADVVARAEAEEKTPLLVLDDVELMPRPLLDELHGFLQPQRSHHFHNAIYVLLSGAGGAEVTRFVLQNASRALPLRPDGFRSAEAAAAQAEEDLRASLLAVLSREHPLWRAAAIVPFLLLDKRDVVSCFRDEMAGEGFFPDQARAENLAAQLSFYRVAGREFAVTGCKQVVATVNLL

SEQ ID NO: 5808 - protein, 427 aa, Homo Sapiens
MEAMAASTSLPDPGDFDRNVPRICGVCGDRATGFHFNAMTCEGCKGFFRRSMKRKALFTCPFNGDCRITKDNRRHCQACRLKRCVDIGMMKEFILTDEEVQRKREMILKRKEEEALKDSLRPKLSEEQQRIIAILLDAHHKTYDPTYSDFCQFRPPVRVNDGGGSHPSRPNSRHTPSFSGDSSSSCSDHCITSSDMMDSSSFSNLDLSEEDSDDPSVTLELSQLSMLPHLADLVSYSIQKVIGFAKMIPGFRDLTSEDQIVLLKSSAIEVIMLRSNESFTMDDMSWTCGNQDYKYRVSDVTKAGHSLELIEPLIKFQVGLKKLNLHEEEHVLLMAICIVSPDRPGVQDAALIEAIQDRLSNTLQTYIRCRHPPPGSHLLYAKMIQKLADLRSLNEEHSKQYRCLSFQPECSMKLTPLVLEVFGNEIS

SEQ ID NO: 5809 - protein, 337 aa, Homo Sapiens
MRPTLLWSLLLLLGVFAAAAAAPPDPLSQLPAPQHPKIRLYNAEQVLSWEPVALSNSTRPVVYRVQFKYTDSKWFTADIMSIGVNCTQITATECDFTAASPSAGFPMDFNVTLRLRAELGALHSAWVTMPWFQHYRNVTVGPPENIEVTPGEGSLIIRFSSPFDIADTSTAFFCYYVHYWEKGGIQQVKGPFRSNSISLDNLKPSRVYCLQVQAQLLWNKSNIFRVGHLSNISCYETMADASTELQQVILISVGTFSLLSVLAGACFFLVLKYRGLIKYWFHTPPSIPLQIEEYLKDPTQPILEALDKDSSPKDDVWDSVSIISFPEKEQEDVLQTL

SEQ ID NO: 5810 - protein, 782 aa, Homo Sapiens [sequence omitted]

SEQ ID NO: 5811 - protein, 188 aa, Homo Sapiens
MTEYKLVVVGACGVGKSALTIQLIQNHFVDEYDPTIEDSYRKQVVIDGETCLLDILDTAGQEEYSAMRDQYMRTGEGFLCVFAINNTKSFEDIHHYREQIKRVKDSEDVPMVLVGNKCDLPSRTVDTKQAQDLARSYGIPFIETSAKTRQGVDDAFYTLVREIRKHKEKMSKDGKKKKKKSKTKCVIM

SEQ ID NO: 5812 - protein, 371 aa, Homo Sapiens
MSMSPKHTTPFSVSDILSPLEESYKKVGMEGGGLGAPLAAYRQGQAAPPTAAMQQHAVGHHGAVTAAYHMTAAGVPQLSHSAVGGYCNGNLGNMSELPPYQDTMRNSASGPGWYGANPDPRFPAISRFMGPASGMNMSGMGGLGSLGDVSKNMAPLPSAPRRKRRVLFSQAQVYELERRFKQQKYLSAPEREHLASMIHLTPTQVKIWFQNHRYKMKRQAKDKAAQQQLQQDSGGGGGGGGTGCPQQQQAQQQSPRRVAVPVLVKDGKPCQAGAPAPGAASLQGHAQQQAQHQAQAAQAAAAAISVGSGGAGLGAHPGHQPGSAGQSPDLAHHAASPAALQGQVSSLSHLNSSGSDYGTMSCSTLLYGRTW

SEQ ID NO: 5813 - protein, 168 aa, Homo Sapiens
MAFNDCFSLNYPGNPCPGDLIEVFRPGYQHWALYLGDGYVINIAPVDGIPASFTSAKSVFSSKALVKMQLLKDVVGNDTYRINNKYDETYPPLPVEEIIKRSEFVIGQEVAYNLLVNNCEHFVTLLRYGEGVSEQANRAISTVEFVTAAVGVFSFLGLFPKGQRAKYY

SEQ ID NO: 5814 - protein, 511 aa, Homo Sapiens
MSRGPEEVNRLTESTYRNVMEQFNPGLRNLINLGKNYEKAVNAMILAGKAYYDGVAKIGEIATGSPVSTELGHVLIEISSTHKKLNESLDENFKKFHKEIIHELEKKIELDVKYMNATLKRYQTEHKNKLESLEKSQAELKKIRRKSQGSRNALKYEHKEIEYVETVTSRQSEIQKFIADGCKEALLEEKRRFCFLVDKHCGFANHIHYYHLQSAELLNSKLPRWQETCVDAIKVPEKIMNMIEEIKTPASTPVSGTPQASPMIERSNVVRKDYDTLSKCSPKMPPAPSGRAYTSPLIDMFNNPATAAPNSQRVNNSTGTSEDPSLQRSVSVATGLNMMKKQKVKTIFPHTAGSNKTLLSFAQGDVITLLIPEEKDGWLYGEHDVSKARGWFPSSYTKLLEENETEAVTVPTPSPTPVRSISTVNLSENSSVVIPPPDYLECLSMGAAADRRADSARTTSTFKAPASKPETAAPNDANGTAKPPFLSGENPFATVKLRPTVTNDRSAPIIR

SEQ ID NO: 5815 - protein, 92 aa, Homo Sapiens [sequence omitted]

SEQ ID NO: 5816 - protein, 822 aa, Homo Sapiens
LPRPRRALVWTGSSRPGELTGARSCSRLGRCTFPLWKGREMEVRKLSISWQFLIVLVLILQILSALDFDPYRVLGVSRTASQADIKKAYKKLAREWHPDKNKDPGAEDKFIQISKAYEILSNEEKRSNYDQYGDAGENQGYQKQQQQREYRFRHFHENFYFDESFFHFPFNSERRDSIDEKYLLHFSHYVNEVVPDSFKKPYLIKITSDWCFSCIHIEPVWKEVIQELEELGVGIGVVHAGYERRLAHHLGAHSTPSILGIINGKISFFHNAVVRENLRQFVESLLPGNLVEKVTNKNYVRFLSGWQQENKPHVLLFDQTPIVPLLYKLTAFAYKDYLSFGYVYVGLRGTEEMTRRYNINIYAPTLLVFKEHINRPADVIQARGMKKQIIDDFITRNKYLLAARLTSQKLFHELCPVKRSHRQRKYCVVLLTAETTKLSKPFEAFLSFALANTQDTVRFVHVYSNRQQEFADTLLPDSEAFQGKSAVSILERRNTAGRVVYKTLEDPWIGSESDKFILLGYLDQLRKDPALLSSEAVLPDLTDELAPVFLLRWFYSASDYISDCWDSIFHNNWREMMPLLSLIFSALFILFGTVIVQAFSDSNDERESSPPEKEEAQEKTGKTEPSFTKENSSKIPKKGFVEVTELTDVTYTSNLVRLRPGHMNVVLILSNSTKTSLLQKFALEVYTFTGSSCLHFSFLSLDKHREWLEYLLEFAQDAAPIPNQYDKHFMERDYTGYVLALNGHKKYFCLFKPQKTVEEEEAIGSCSDVDSSLYLGESRGKPSCGLGSRPIKGKLSKLSLWMERLLEGSLQRFYIPSWPELD

SEQ ID NO: 5817 - protein, 649 aa, Homo Sapiens
MSSFGAGKTKEVIFSVEDGSVKMFLRGRPVPMMIPDELAPTYSLDTRSELPSCRLKLEWVYGYRGRDCRANLYLLPTGEIVYFVASVAVLYSVEEQRQRHYLGHNDDIKCLAIHPDMVTIATGQVAGTTKEGKPLPPHVRIWDSVSLSTLHVLGLGVFDRAVCCVGFSKSNGGNLLCAVDESNDHMLSVWDWAKETKVVDVKCSNEAVLVATFHPTDPTVLITCGKSHIYFWTLEGGSLSKRQGLFEKHEKPKYVLCVTFLEGGDVVTGDSGGNLYVWGKGGNRITQAVLGAHDGGVFGLCALRDGTLVSGGGRDRRVVLWGSDYSKLQEVEVPEDFGPVRTVAEGHGDTLYVGTTRNSILQGSVHTGFSLLVQGHVEELWGLATHPSRAQFVTCGQDKLVHLWSSDSHQPLWSRIIEDPARSAGFHPSGSVLAVGTVTGRWLLLDTETHDLVAIHTDGNEQISVVSFSPDGAYLAVGSHDNLVYVYTVDQGGRKVSRLGKCSGHSSFITHLDWAQDSSCFVTNSGDYEILYWDPATCKQITSADAVRNMEWATATCVLGFGVFGIWSEGADGTDINAVARSHDGKLLASADDFGKVHLFSYPCCQPRALSHKYGGHSSHVTNVAFLWDDSMALTTGGKDTSVLQWRVV

SEQ ID NO: 5818 - protein, 299 aa, Homo Sapiens
MASQVLVYPPYVYQTQSSAFCSVKKLKVEPSSCVFQERNYPRTYVNGRNFGNSHPPTKGSAFQTKIPFNRPRGHNFSLQTSAVVLKNTAGATKVIAAQAQQAHVQAPQIGAWRNRLHFLEGPQRCGLKRKSEELDNHSSAMQIVDELSILPAMLQTNMGNPVTVVTATTGSKQNCTTGEGDYQLVQHEVLCSMKNTYEVLDFLGRGTFGQVVKCWKRGTNEIVAIKILKNHPSYARQGQIEVSILARLSTENADEYNFVRAYECFQHRNHTCLVFEMLEQNLYDFLKQNKFSPLPRAEF
